(19) United States
(12) Patent Application Publication
(10) Pub. No.: US 2026/0137045 A1
(43) Pub. Date: May 21, 2026

(54) VIRUS AND INSECT RESISTANCE AND MARKERS IN BARLEY

(71) Applicant: KWS SAAT SE & Co. KGaA, Einbeck (DE)

(72) Inventors: Viktor KORZUN, Einbeck (DE); Neele WENDLER, Einbeck (DE); Klaus OLDACH, Bergen (DE); Anja MAASBERG, Northeim (DE); Jörg GROSSER, Northeim (DE); Nils STEIN, Seeland (DE); Hélène PIDON, Seeland (DE); Frank ORDON, Quedlinburg (DE); Antje HABEKUSS, Quedlinburg (DE)

(73) Assignee: KWS SAAT SE & Co. KGaA, Einbeck (DE)

(21) Appl. No.: 19/119,633

(22) PCT Filed: Oct. 11, 2023
(86) PCT No.: PCT/EP2023/078123

§ 371 Date: Apr. 9, 2025

(30) Foreign Application Priority Data
Oct. 11, 2022 (EP) 22200806.2

(51) Int. Cl. A01H 6/46; A01H 1/00; A01H 1/04; A01H 5/10

(52) U.S. Cl. CPC A01H 6/4624; A01H 1/045; A01H 1/126; A01H 1/127; A01H 5/10

(57) ABSTRACT

The present invention relates to identifying, selecting, or generating a barley plant or plant part having (improved) resistance (or tolerance) to Barley Yellow Dwarf Virus (BYDV) and/or insects, comprising screening for the presence or absence of one or more molecular marker co-segregating with a resistance locus comprising a resistance gene located on chromosome 3. The invention further relates to the resistance gene and polynucleotides encoding the resistance gene or capable of detecting the resistance gene, in particular molecular markers. The invention further relates to barley plants comprising the resistance gene.

### FIELD OF THE INVENTION

[0001] The invention relates to plant breeding, in particular the generation and identification of plants of the genus Hordeum having resistance to insects and viruses, such as Barley yellow dwarf virus. The present invention further relates to markers and genes useful in the generation and identification of such Hordeum plants.

### BACKGROUND OF THE INVENTION

[0002] Barley yellow dwarf (BYD) is a plant disease caused by the barley yellow dwarf virus (BYDV), and is a widely distributed viral disease of cereals. It affects economically important crop species such as barley, oats, wheat, maize, triticale and rice. Barley yellow dwarf virus (BYDV), a member of the Luteoviruses in the family Tombusviridae. The geographical distribution of Luteoviruses is widespread, with the virus primarily infecting plants via transmission by aphid vectors. BYDV is transmitted by more than 20 aphid species. Aphids acquire BYDV by feeding on infected plants and transmit the virus in subsequent feedings.

[0003] Scholz et al. (Theor Appl Genet; 119:837-849) identified Ryd4Hb, a genetic locus on chromosome 3H originating from Hordeum bulbosum and conferring resistance to BYDV. No exact location, nor the identity of the resistance gene has been determined. A lethality factor was observed in close genetic linkage to Ryd4Hb. In the homozygous presence of this lethality factor, barley seedlings do not continue to mature but usually die at an early stage in development. The association with the lethality factor is a clear disadvantage, in particular in hybrid breeding programs, in which homozygous parents are desirable.

[0004] It is an objective of the present invention to address one or more of the above shortcomings.

### SUMMARY OF THE INVENTION

[0005] The present invention relates to a virus-, in particular BYDV-, and/or insect-, in particular aphid-, resistance locus and genes associated therewith. The invention further relates to molecular markers and SNPs associated with the resistance locus and genes. Hereto, the invention relates to the use of the markers and SNPs for identifying the resistance locus and genes, in particular in barley. The invention further relates to the use of the resistance locus and genes for generating plants, in particular barley plants. The invention further relates to such plants comprising the resistance locus and genes and the associated markers and SNPs. The invention also relates to polynucleic acids comprising the resistance locus, genes, markers, or SNPs of the invention.

[0006] The present inventors have fine-mapped a resistance locus originating from Hordeum bulbosum, and identified resistance genes and associated markers and SNPs. Surprisingly, a lethality factor previously known to be associated with the resistance locus could be eliminated in the resistance locus of the invention.

[0007] The present invention provides genetic markers for fine mapping and selection of Ryd4Hb gene in Barley. By using the markers, it is possible to identify and isolate the virus resistance genes, in particular, BYDV virus resistance.

[0008] Another aspect of the present invention is use of a Barley Yellow Dwarf Resistance (BYDV) gene to mediate resistance to said virus.

[0009] In a further aspect, the present invention includes transgene or gene editing approaches of Ryd4Hb, which give resistance to said virus.

[0010] The present invention is in particular captured by any one or any combination of one or more of the below numbered statements 1 to 80, with any other statement and/or embodiments.
[0011] 1. A method for identifying and/or selecting a barley plant or plant part, such as a plant or plant part having (improved) resistance (or tolerance) to Barley Yellow Dwarf Virus (BYDV) and/or insects, comprising screening for the presence or absence of one or more molecular marker co-segregating with resistance locus comprising a resistance gene located on chromosome 3 in a region comprising
[0012] a) the nucleotide sequence having SEQ ID NO: 1,
[0013] b) a nucleotide sequence hybridizing with the nucleotide sequence of a) or a complement thereof or a reverse complement thereof under stringent conditions,
[0014] c) a nucleotide sequence having an identity of at least 90% to the nucleotide sequence of a).
[0015] 2. The method according to statement 1, wherein the markers are located in a region
[0016] i. between position 573789473 of reference genome MOREX v3 detectable by molecular marker ge51829s01 and the resistance gene,
[0017] ii. between position 577673982 of reference genome MOREX v3 detectable by molecular marker ge51835s01 and the resistance gene,
[0018] iii. between position 591505046 of reference genome MOREX v3 detectable by molecular marker ge45688s01 and the resistance gene,
[0019] iv. between position 592578134 of reference genome MOREX v3 detectable by molecular marker ge45691s01 and the resistance gene,
[0020] v. between position 592685940 of reference genome MOREX v3 detectable by molecular marker ge45717s01 and the resistance gene,
[0021] vi. between the resistance gene and position 592752433 of reference genome MOREX v3 detectable by molecular marker ge45718s01, or
[0022] vii. between the resistance gene and position 592849403 of reference genome MOREX v3 detectable by molecular marker ge45719s01.
[0023] 3. A method for identifying and/or selecting a barley plant or plant part, such as a barley plant or plant part having (improved) resistance (or tolerance) to Barley Yellow Dwarf Virus (BYDV) and/or insects, such as a method according to statement 1 or 2, comprising screening for the presence of a polynucleotide (in particular comprising a resistance gene or a resistance locus comprising a resistance gene on chromosome 3, such as defined in the previous statements) comprising one or more molecular marker (allele) selected from ge51829s01, ge51835s01, ge45688s01, ge45691s01, ge45717s01, ge45718s01, and ge45719s01 (in the genome of the plant or plant part).
[0024] 4. The method according to statement 3, comprising screening for the presence of one or more molecular marker (allele) selected from ge51829s01, ge51835s01, ge45688s01, ge45691s01, ge45717s01, ge45718s01, and ge45719s01 (in the genome of the plant or plant part).
[0025] 5. A method for identifying and/or selecting a barley plant or plant part, such as a barley plant or plant part having (improved) resistance (or tolerance) to Barley Yellow Dwarf Virus (BYDV) and/or insects, such as a method according to statement 1 or 2, comprising screening for the presence of a polynucleotide (in particular comprising a resistance gene or a resistance locus comprising a resistance gene on chromosome 3, such as defined in the previous statements) comprising one or more molecular marker (allele) selected from ge45717s01 and ge45718s01 (in the genome of the plant or plant part).
[0026] 6. The method according to statement 5, comprising screening for the presence of one or more molecular marker (allele) selected from ge45717s01 and ge45718s01 (in the genome of the plant or plant part).
[0027] 7. A method for identifying and/or selecting a barley plant or plant part, such as a barley plant or plant part having (improved) resistance (or tolerance) to Barley Yellow Dwarf Virus (BYDV) and/or insects, such as a method according to statement 1 or 2, comprising screening for the presence of a polynucleotide (in particular comprising a resistance gene or a resistance locus comprising a resistance gene on chromosome 3, such as defined in the previous statements) flanked by molecular marker (allele) ge45717s01 and ge45718s01 (in the genome of the plant or plant part).
[0028] 8. A method for identifying and/or selecting a barley plant or plant part, such as a barley plant or plant part having (improved) resistance (or tolerance) to Barley Yellow Dwarf Virus (BYDV) and/or insects, such as a method according to statement 1 or 2, comprising screening for the presence of a polynucleotide (in particular comprising a resistance gene or a resistance locus comprising a resistance gene on chromosome 3, such as defined in the previous statements) comprising one or more SNP corresponding to position 573789473, 577673982, 591505046, 592578134, 592685940, 592752433, and 592849403 of Hordeum vulgare reference genome Morex v3.
[0029] 9. A method for identifying and/or selecting a barley plant or plant part, such as a barley plant or plant part having (improved) resistance (or tolerance) to Barley Yellow Dwarf Virus (BYDV) and/or insects, such as a method according to statement 1 or 2, comprising screening for the presence of a polynucleic acid comprising a Barley Yellow Dwarf Virus (BYDV) and/or insect resistance gene (in particular comprising a resistance gene or a resistance locus comprising a resistance gene on chromosome 3, such as defined in the previous statements) or Ryd4Hb gene (on chromosome 3) or coding sequence thereof.
[0030] 10. A method for identifying and/or selecting a barley plant or plant part, such as a barley plant or plant part having (improved) resistance (or tolerance) to Barley Yellow Dwarf Virus (BYDV) and/or insects, such as a method according to statement 1 or 2, comprising screening for the presence of one or more molecular marker (allele) selected from ge51829s01, ge51835s01, ge45688s01, ge45691s01, ge45717s01, ge45718s01, and ge45719s01 (in the genome (in particular comprising a resistance gene or a resistance locus comprising a resistance gene on chromosome 3, such as defined in the previous statements) of the plant or plant part).
[0031] 11. A method for identifying and/or selecting a barley plant or plant part, such as a barley plant or plant part having (improved) resistance (or tolerance) to Barley Yellow Dwarf Virus (BYDV) and/or insects, such as a method according to statement 1 or 2, comprising screening for the presence of one or more molecular marker (allele) selected from ge45717s01 and ge45718s01 (in the genome (in particular comprising a resistance gene or a resistance locus comprising a resistance gene on chromosome 3, such as defined in the previous statements) of the plant or plant part).
[0032] 12. A method for identifying and/or selecting a barley plant or plant part, such as a barley plant or plant part having (improved) resistance (or tolerance) to Barley Yellow Dwarf Virus (BYDV) and/or insects, such as a method according to statement 1 or 2, comprising screening for the presence of one or more SNP corresponding to position 573789473, 577673982, 591505046, 592578134, 592685940, 592752433, and 592849403 of Hordeum vulgare reference genome Morex v3.
[0033] 13. A method for identifying and/or selecting a barley plant or plant part, such as a barley plant or plant part having (improved) resistance (or tolerance) to Barley Yellow Dwarf Virus (BYDV) and/or insects, such as a method according to statement 1 or 2, comprising screening for the presence of a Barley Yellow Dwarf Virus (BYDV) and/or insect resistance gene (in particular comprising a resistance gene or a resistance locus comprising a resistance gene on chromosome 3, such as defined in the previous statements) or Ryd4Hb gene (in particular comprising a resistance gene or a resistance locus comprising a resistance gene on chromosome 3, such as defined in the previous statements) or coding sequence thereof.
[0034] 14. The method according to any of statements 1 to 13, comprising screening for the presence or absence of one or more molecular marker co-segregating with resistance locus comprising a resistance gene located on chromosome 3 in a region comprising
[0035] a) the nucleotide sequence having SEQ ID NO: 1,
[0036] b) a nucleotide sequence hybridizing with the nucleotide sequence of a) or a complement thereof or a reverse complement thereof under stringent conditions,
[0037] c) a nucleotide sequence having an identity of at least 90% to the nucleotide sequence of a).
[0038] 15. The method according to statement 14, wherein the markers are located in a region
[0039] i. between position 573789473 of reference genome MOREX v3 detectable by molecular marker ge51829s01 and the resistance gene,
[0040] ii. between position 577673982 of reference genome MOREX v3 detectable by molecular marker ge51835s01 and the resistance gene,
[0041] iii. between position 591505046 of reference genome MOREX v3 detectable by molecular marker ge45688s01 and the resistance gene,
[0042] iv. between position 592578134 of reference genome MOREX v3 detectable by molecular marker ge45691s01 and the resistance gene,
[0043] v. between position 592685940 of reference genome MOREX v3 detectable by molecular marker ge45717s01 and the resistance gene,
[0044] vi. between the resistance gene and position 592752433 of reference genome MOREX v3 detectable by molecular marker ge45718s01, or
[0045] vii. between the resistance gene and position 592849403 of reference genome MOREX v3 detectable by molecular marker ge45719s01.
[0046] 16. The method according to any of statements 1 to 15, wherein
[0047] ge51829s01 is detectably by molecular marker of SEQ ID NO: 3 or has a nucleotide sequence as set forth in SEQ ID NO: 3 or a nucleotide sequence which is at least 90% identical to SEQ ID NO: 3, the complement or reverse complement thereof;
[0048] ge51835s01 is detectably by molecular marker of SEQ ID NO: 4 or has a nucleotide sequence as set forth in SEQ ID NO: 4 or a nucleotide sequence which is at least 90% identical to SEQ ID NO: 4, the complement or reverse complement thereof;
[0049] ge45688s01 is detectably by molecular marker of SEQ ID NO: 5 or has a nucleotide sequence as set forth in SEQ ID NO: 5 or a nucleotide sequence which is at least 90% identical to SEQ ID NO: 5, the complement or reverse complement thereof;
[0050] ge45691s01 is detectably by molecular marker of SEQ ID NO: 6 or has a nucleotide sequence as set forth in SEQ ID NO: 6 or a nucleotide sequence which is at least 90% identical to SEQ ID NO: 6, the complement or reverse complement thereof;
[0051] ge45717s01 is detectably by molecular marker of SEQ ID NO: 7 or has a nucleotide sequence as set forth in SEQ ID NO: 7 or a nucleotide sequence which is at least 90% identical to SEQ ID NO: 7, the complement or reverse complement thereof;
[0052] ge45718s01 is detectably by molecular marker of SEQ ID NO: 8 or has a nucleotide sequence as set forth in SEQ ID NO: 8 or a nucleotide sequence which is at least 90% identical to SEQ ID NO: 8, the complement or reverse complement thereof; and/or
[0053] ge45719s01 is detectably by molecular marker of SEQ ID NO: 9 or has a nucleotide sequence as set forth in SEQ ID NO: 9 or a nucleotide sequence which is at least 90% identical to SEQ ID NO: 9, the complement or reverse complement thereof.
[0054] 17. The method according to any of statements 1 to 16, wherein ge51829s01 comprises a SNP corresponding to position 573789473 of Hordeum vulgare reference genome Morex v3;
[0055] ge51835s01 comprises a SNP corresponding to position 577673982 of Hordeum vulgare reference genome Morex v3;
[0056] ge45688s01 comprises a SNP corresponding to position 591505046 of Hordeum vulgare reference genome Morex v3;
[0057] ge45691s01 comprises a SNP corresponding to position 592578134 of Hordeum vulgare reference genome Morex v3;
[0058] ge45717s01 comprises a SNP corresponding to position 592685940 of Hordeum vulgare reference genome Morex v3;
[0059] ge45718s01 comprises a SNP corresponding to position 592752433 of Hordeum vulgare reference genome Morex v3; and/or
[0060] ge45719s01 comprises a SNP corresponding to position 592849403 of Hordeum vulgare reference genome Morex v3.
[0061] 18. The method according to any of statements 1 to 17, wherein
[0062] ge51829s01 comprises a SNP corresponding to position 101 of SEQ ID NO: 3;
[0063] ge51835s01 comprises a SNP corresponding to position 101 of SEQ ID NO: 4;
[0064] ge45688s01 comprises a SNP corresponding to position 101 of SEQ ID NO: 5;
[0065] ge45691s01 comprises a SNP corresponding to position 101 of SEQ ID NO: 6;
[0066] ge45717s01 comprises a SNP corresponding to position 56 of SEQ ID NO: 7;
[0067] ge45718s01 comprises a SNP corresponding to position 57 of SEQ ID NO: 8; and/or
[0068] ge45719s01 comprises a SNP corresponding to position 51 of SEQ ID NO: 9.
[0069] 19. The method according to any of statements 1 to 18, comprising screening for the presence of one or more of said SNPs.
[0070] 20. The method according to any of statements 17 to 19, wherein said SNP is
[0071] G in ge51829s01;
[0072] C in ge51835s01;
[0073] K, preferably G in ge45688s01;
[0074] R, preferably A in ge45691s01;
[0075] Y, preferably C in ge45717s01;
[0076] T in ge45718s01; and/or
[0077] T in ge45719s01; preferably wherein said SNP is
[0078] K, preferably G in ge45688s01;
[0079] R, preferably A in ge45691s01;
[0080] Y, preferably C in ge45717s01;
[0081] T in ge45718s01; and/or
[0082] T in ge45719s01.
[0083] 21. The method according to any of statements 1 to 20, wherein said Barley Yellow Dwarf Virus (BYDV) and/or insect resistance gene or Ryd4Hb gene has
[0084] (1) a genomic sequence of HORVU.MOREX.r2.3HG0265710, HORVU.MOREX.r2.3HG0265660, HORVU.MOREX.r2.3HG0265670, HORVU.MOREX.r2.3HG0265690, or HORVU.MOREX.r2.3HG0265720; or a sequence which is at least at least 90%, preferably at least 95%, identical to a genomic sequence of HORVU.MOREX.r2.3HG0265710, HORVU.MOREX.r2.3HG0265660, HORVU.MOREX.r2.3HG0265670, HORVU.MOREX.r2.3HG0265690, or HORVU.MOREX.r2.3HG0265720;
[0085] (2) a coding sequence of HORVU.MOREX.r2.3HG0265710, HORVU.MOREX.r2.3HG0265660, HORVU.MOREX.r2.3HG0265670, HORVU.MOREX.r2.3HG0265690, or HORVU.MOREX.r2.3HG0265720, or a coding sequence which is at least 90%, preferably at least 95%, identical to a coding sequence of HORVU.MOREX.r2.3HG0265710, HORVU.MOREX.r2.3HG0265660, HORVU.MOREX.r2.3HG0265670, HORVU.MOREX.r2.3HG0265690, or HORVU.MOREX.r2.3HG0265720;
[0086] (3) a sequence encoding a HORVU.MOREX.r2.3HG0265710, HORVU.MOREX.r2.3HG0265660, HORVU.MOREX.r2.3HG0265670, HORVU.MOREX.r2.3HG0265690, or HORVU.MOREX.r2.3HG0265720 protein; or encoding a protein having a sequence which is at least 90%, preferably at least 95%, identical to a protein sequence of HORVU.MOREX.r2.3HG0265710, HORVU.MOREX.r2.3HG0265660, HORVU.MOREX.r2.3HG0265670, HORVU.MOREX.r2.3HG0265690, or HORVU.MOREX.r2.3HG0265720; and/or
[0087] (4) a sequence hybridizing with the sequence of (1), (2), and/or (3) or a complement thereof or a reverse complement thereof (under stringent conditions).
[0088] 22. The method according to any of statements 1 to 21, wherein said polynucleotide, molecular marker (allele), resistance gene, Ryd4Hb gene, or SNP is comprised in chromosome 3H.
[0089] 23. The method according to any of statements 1 to 22, which is a method for identifying a barley plant or plant part having (improved) resistance (or tolerance) to Barley Yellow Dwarf Virus (BYDV) and/or insects.
[0090] 24. The method according to statement 23, wherein said resistance (or tolerance) is improved compared to Hordeum vulgare reference line Morex v3 or compared to an (near) isogenic line not comprising said molecular marker (allele), polynucleotide resistance gene, Ryd4Hb gene, or SNP.
[0091] 25. The method according to statement 23, wherein said resistance (or tolerance) is improved by at least 10%, preferably at least 20%, compared to Hordeum vulgare reference line Morex v3 or compared to an (near) isogenic line not comprising said polynucleotide, molecular marker (allele), resistance gene, Ryd4Hb gene, or SNP.
[0092] 26. The method according to any of statements 1 to 25, comprising isolating genomic DNA from the plant or plant part.
[0093] 27. The method according to any of statements 1 to 26, comprising selecting a plant of plant part comprising the polynucleotide, one or more of the (molecular) marker (allele), or the SNP.
[0094] 28. The method according to any of statements 1 to 27, wherein said plant part is a seed.
[0095] 29. The method according to any of statements 1 to 27, wherein said plant part is not propagation material.
[0096] 30. The method according to any of statements 1 to 29, wherein said plant or plant part is identified as having (improved) resistance (or tolerance) to BYDV and/or insects, if one or more of the polynucleic acid, one or more of the (molecular) marker (allele), resistance gene, Ryd4Hb gene, or SNP is present in the genome of said plant or plant part.
[0097] 31. The method according to statement 30, wherein said resistance (or tolerance) is improved compared to Hordeum vulgare reference line Morex v3 or compared to an (near) isogenic line not comprising said molecular marker (allele), polynucleotide or SNP.
[0098] 32. The method according to statement 30, wherein said resistance (or tolerance) is improved by at least 10%, preferably at least 20%, compared to Hordeum vulgare reference line Morex v3 or compared to an (near) isogenic line not comprising said polynucleotide, molecular marker (allele), or SNP.
[0099] 33. A barley plant or plant part, such as a barley plant or plant part having (improved) resistance (or tolerance) to Barley Yellow Dwarf Virus (BYDV) and/or insects, comprising one or more polynucleic acid or resistance gene or locus as defined in any of statements 1 to 32.
[0100] 34. A barley plant or plant part, such as a barley plant or plant part having (improved) resistance (or tolerance) to Barley Yellow Dwarf Virus (BYDV) and/or insects, comprising one or more molecular marker (allele) as defined in any of statements 1 to 32.
[0101] 35. A barley plant or plant part, such as a barley plant or plant part having (improved) resistance (or tolerance) to Barley Yellow Dwarf Virus (BYDV) and/or insects, comprising one or more SNP as defined in any of statements 1 to 32.
[0102] 36. A barley plant or plant part, such as a barley plant or plant part having (improved) resistance (or tolerance) to Barley Yellow Dwarf Virus (BYDV) and/or insects, comprising (and expression or capable of expressing) one or more the a Barley Yellow Dwarf Virus (BYDV) and/or insect resistance gene (in particular comprising a resistance gene or a resistance locus comprising a resistance gene on chromosome 3, such as defined in the previous statements) or Ryd4Hb gene (in particular comprising a resistance gene or a resistance locus comprising a resistance gene on chromosome 3, such as defined in the previous statements) or coding sequence thereof as defined in statement 21.
[0103] 37. A barley plant or plant part, such as a barley plant or plant part having (improved) resistance (or tolerance) to Barley Yellow Dwarf Virus (BYDV) and/or insects, comprising (and expressing or capable of expressing) the Barley Yellow Dwarf Virus (BYDV) and/or insect resistance gene (in particular comprising a resistance gene or a resistance locus comprising a resistance gene on chromosome 3, such as defined in the previous statements) or the Ryd4Hb gene (in particular comprising a resistance gene or a resistance locus comprising a resistance gene on chromosome 3, such as defined in the previous statements) or coding sequence thereof and comprising one or more molecular markers (alleles) or SNPs as defined in any of statements 1 to 32.
[0104] 38. A barley plant or plant part, such as a barley plant or plant part having (improved) resistance (or tolerance) to Barley Yellow Dwarf Virus (BYDV) and/or insects comprising (and expressing or capable of expressing) the Barley Yellow Dwarf Virus (BYDV) and/or insect resistance gene or the Ryd4Hb gene or coding sequence thereof and comprising one or more molecular markers (alleles) ge45717s01 and ge45718s01 and/or not comprising one or more molecular markers (alleles) ge51829s01, ge51835s01, ge45688s01, ge45691s01, and/or ge45719s01, or the respective SNPs (as defined in the preceding statements) comprised therein.
[0105] 39. The barley plant or plant part according to any of statements 33 to 38, comprising the one or more polynucleic acid, molecular marker (allele), resistance gene, Ryd4Hb, or SNP on chromosome 3H.
[0106] 40. The barley plant or plant part according to any of statements 33 to 39, wherein said one or more polynucleic acid, molecular marker (allele), resistance gene, Ryd4Hb, or SNP is homozygous.
[0107] 41. The barley plant or plant part according to any of statements 33 to 39, wherein said one or more polynucleic acid, molecular marker (allele), resistance gene, Ryd4Hb, or SNP is heterozygous.
[0108] 42. The barley plant or plant part according to any of statements 33 to 41, wherein said plant or plant part is transposon mutagenized.
[0109] 43. The barley plant or plant part according to any of statements 33 to 41, wherein said plant or plant part is transgenic or gene-edited.
[0110] 44. The barley plant or plant part according to any of statements 33 to 41, wherein said plant or plant part is obtained by introgression of said one or more polynucleic acid, molecular marker (allele), resistance gene, Ryd4Hb, or SNP.
[0111] 45. The barley plant or plant part according to any of statements 33 to 44, wherein the resistance locus has the marker haplotype:
[0112] cytosine (C) or thymine (T) at position 592685940 with reference to genome MOREX v3, and thymine (T) at position 592752433 with reference to genome MOREX v3.
[0113] 46. The barley plant or plant part according to any of statements 33 to 45, wherein the resistance locus has the marker haplotype:
[0114] (I) adenine (A) at position 573789473 with reference to genome MOREX v3, cytosine (C) at position 577673982 with reference to genome MOREX v3, guanine (G) at position 591505046 with reference to genome MOREX v3, adenine (A) at position 592578134 with reference to genome MOREX v3, and thymine (T) at position 592849403 with reference to genome MOREX v3;
[0115] (II) adenine (A) at position 573789473 with reference to genome MOREX v3, guanine (G) at position 577673982 with reference to genome MOREX v3, guanine (G) at position 591505046 with reference to genome MOREX v3, adenine (A) at position 592578134 with reference to genome MOREX v3, and thymine (T) at position 592849403 with reference to genome MOREX v3;
[0116] (III) adenine (A) at position 573789473 with reference to genome MOREX v3, guanine (G) at position 577673982 with reference to genome MOREX v3, thymine (T) at position 591505046 with reference to genome MOREX v3, adenine (A) at position 592578134 with reference to genome MOREX v3, and thymine (T) at position 592849403 with reference to genome MOREX v3;
[0117] (IV) adenine (A) at position 573789473 with reference to genome MOREX v3, guanine (G) at position 577673982 with reference to genome MOREX v3, thymine (T) at position 591505046 with reference to genome MOREX v3, guanine (G) at position 592578134 with reference to genome MOREX v3, and thymine (T) at position 592849403 with reference to genome MOREX v3;
[0118] (V) guanine (G) at position 573789473 with reference to genome MOREX v3, cytosine (C) at position 577673982 with reference to genome MOREX v3, guanine (G) at position 591505046 with reference to genome MOREX v3, adenine (A) at position 592578134 with reference to genome MOREX v3, and cytosine (C) at position 592849403 with reference to genome MOREX v3;
[0119] (VI) adenine (A) at position 573789473 with reference to genome MOREX v3, cytosine (C) at position 577673982 with reference to genome MOREX v3, guanine (G) at position 591505046 with reference to genome MOREX v3, adenine (A) at position 592578134 with reference to genome MOREX v3, and cytosine (C) at position 592849403 with reference to genome MOREX v3;
[0120] (VII) adenine (A) at position 573789473 with reference to genome MOREX v3, guanine (G) at position 577673982 with reference to genome MOREX v3, guanine (G) at position 591505046 with reference to genome MOREX v3, adenine (A) at position 592578134 with reference to genome MOREX v3, and cytosine (C) at position 592849403 with reference to genome MOREX v3;
[0121] (VIII) adenine (A) at position 573789473 with reference to genome MOREX v3, guanine (G) at position 577673982 with reference to genome MOREX v3, thymine (T) at position 591505046 with reference to genome MOREX v3, adenine (A) at position 592578134 with reference to genome MOREX v3, and cytosine (C) at position 592849403 with reference to genome MOREX v3;
[0122] (IX) adenine (A) at position 573789473 with reference to genome MOREX v3, guanine (G) at position 577673982 with reference to genome MOREX v3, thymine (T) at position 591505046 with reference to genome MOREX v3, guanine (G) at position 592578134 with reference to genome MOREX v3, and cytosine (C) at position 592849403 with reference to genome MOREX v3;
[0123] (X) thymine (T) at position 591505046 with reference to genome MOREX v3, guanine (G) at position 592578134 with reference to genome MOREX v3, and thymine (T) at position 592849403 with reference to genome MOREX v3; or
[0124] (XI) guanine (G) at position 591505046 with reference to genome MOREX v3, adenine (A) at position 592578134 with reference to genome MOREX v3, and thymine (T) at position 592849403 with reference to genome MOREX v3.
[0125] 47. The barley plant or plant part according to any of statements 33 to 45, wherein the polynucleotide or resistance locus comprises the resistance gene located on chromosome 3 in a region comprising
[0126] a) the nucleotide sequence having SEQ ID NO: 1,
[0127] b) a nucleotide sequence hybridizing with the nucleotide sequence of a) or a complement thereof or a reverse complement thereof under stringent conditions,
[0128] c) a nucleotide sequence having an identity of at least 90% to the nucleotide sequence of a).
[0129] 48. The method according to any of statements 1 to 32, wherein said polynucleotide has a length of at most 1 Mb, preferably at most 500 kb, more preferably at most 200 kb, most preferably at most 100 kb.
[0130] 49. A method for generating or producing a barley plant or plant part, such as a barley plant or plant part having (improved) resistance (or tolerance) to Barley Yellow Dwarf Virus (BYDV) and/or insects, and/or for improving BYDV or insect resistance (or tolerance) in a barley plant or plant part, comprising introducing into the genome of a barley plant or plant part a polynucleic acid comprising the Barley Yellow Dwarf Virus (BYDV) and/or insect resistance gene or the Ryd4Hb gene or coding sequence thereof, one or more polynucleotide, one or more (molecular) marker (allele), or one or more SNP as defined in any of statements 1 to 32.
[0131] 50. A method for generating or producing a barley plant or plant part, such as a barley plant or plant part having (improved) resistance (or tolerance) to Barley Yellow Dwarf Virus (BYDV) and/or insects, and/or for improving BYDV and/or insect resistance (or tolerance) in a barley plant or plant part, comprising introducing into the genome of a barley plant or plant part a polynucleotide having a sequence selected from
[0132] (1) a genomic sequence of HORVU.MOREX.r2.3HG0265710, HORVU.MOREX.r2.3HG0265660, HORVU.MOREX.r2.3HG0265670, HORVU.MOREX.r2.3HG0265690, or HORVU.MOREX.r2.3HG0265720; or a sequence which is at least at least 90%, preferably at least 95%, identical to a genomic sequence of HORVU.MOREX.r2.3HG0265710, HORVU.MOREX.r2.3HG0265660, HORVU.MOREX.r2.3HG0265670, HORVU.MOREX.r2.3HG0265690, or HORVU.MOREX.r2.3HG0265720;
[0133] (2) a coding sequence of HORVU.MOREX.r2.3HG0265710, HORVU.MOREX.r2.3HG0265660, HORVU.MOREX.r2.3HG0265670, HORVU.MOREX.r2.3HG0265690, or HORVU.MOREX.r2.3HG0265720, or a coding sequence which is at least 90%, preferably at least 95%, identical to a coding sequence of HORVU.MOREX.r2.3HG0265710, HORVU.MOREX.r2.3HG0265660, HORVU.MOREX.r2.3HG0265670, HORVU.MOREX.r2.3HG0265690, or HORVU.MOREX.r2.3HG0265720;
[0134] (3) a sequence encoding a HORVU.MOREX.r2.3HG0265710, HORVU.MOREX.r2.3HG0265660, HORVU.MOREX.r2.3HG0265670, HORVU.MOREX.r2.3HG0265690, or HORVU.MOREX.r2.3HG0265720 protein; or encoding a protein having a sequence which is at least 90%, preferably at least 95%, identical to a protein sequence of HORVU.MOREX.r2.3HG0265710, HORVU.MOREX.r2.3HG0265660, HORVU.MOREX.r2.3HG0265670, HORVU.MOREX.r2.3HG0265690, or HORVU.MOREX.r2.3HG0265720; and/or
[0135] (4) a sequence hybridizing with the sequence of (1), (2), and/or (3) or a complement thereof or a reverse complement thereof (under stringent conditions).
[0136] 51. The method according to statement 49 or 50, wherein said polynucleotide has a length of at most 1 Mb, preferably at most 500 kb, more preferably at most 200 kb, most preferably at most 100 kb.
[0137] 52. The method according to any of statements 49 to 51, wherein introducing into the genome comprises introgression.
[0138] 53. The method according to any of statements 49 to 52, comprising (a) providing a first barley plant having the one or more polynucleic acid, molecular marker (allele), resistance gene, Ryd4Hb, or SNP as defined in any of statements 1 to 32, (b) crossing said first barley plant with a second barley plant, and (c) selecting progeny plants having the one or more polynucleic acid, molecular marker (allele), resistance gene, Ryd4Hb, or SNP as defined in any of statements 1 to 32.
[0139] 54. The method according to statement 53, further comprising (d) harvesting a plant part from said progeny.
[0140] 55. The method according to any of statements 49 to 51, wherein introducing into the genome comprises transposon mutagenesis.
[0141] 56. The method according to any of statements 49 to 51, wherein introducing into the genome comprises transgenesis or gene-editing.
[0142] 57. The method according to any of 49 to 56, wherein said plant part is a plant cell, tissue, organ, or seed.
[0143] 58. The method according to any of statements 49 to 57, wherein said plant part is a an immature or mature embryo, an inflorescence, a protoplast or callus.
[0144] 59. The method according to any of statements 49 to 51 or 55 to 58, comprising transforming a plant or plant part, preferably a plant cell, more preferably an immature or mature embryo, an inflorescence, a protoplast or callus, with said polynucleotide, said one or more (molecular) marker (allele), said Ryd4Hb, or said one or more SNP, and optionally regenerating a plant from said plant cell, preferably immature or mature embryo, inflorescence, protoplast or callus.
[0145] 60 A barley plant or plant part, such as a barley plant or plant part having (improved) resistance (or tolerance) to Barley Yellow Dwarf Virus (BYDV) and/or insects, obtainable by the method according to any of statements 49 to 59.
[0146] 61. Use of a polynucleic acid, molecular marker (allele), resistance gene, Ryd4Hb gene or coding sequence, or SNP as defined in any of statements 1 to 32 for generating a barley plant or plant part.
[0147] 62. Use of a polynucleic acid, molecular marker (allele), resistance gene, Ryd4Hb gene or coding sequence, or SNP as defined in any of statements 1 to 32 for generating a barley plant or plant part having (improved) resistance (or tolerance) to Barley Yellow Dwarf Virus (BYDV) and/or insects.
[0148] 63. Use according to statement 62, wherein said resistance (or tolerance) is improved compared to Hordeum vulgare reference line Morex v3 or compared to an (near) isogenic line not comprising said molecular marker (allele), polynucleotide, resistance gene, Ryd4Hb gene, or SNP.
[0149] 64. Use according to statement 63, wherein said resistance (or tolerance) is improved by at least 10%, preferably at least 20%, compared to Hordeum vulgare reference line Morex v3 or compared to an (near) isogenic line not comprising said molecular marker (allele), polynucleotide, resistance gene, Ryd4Hb gene, or SNP.
[0150] 65. Use of a polynucleic acid, molecular marker (allele), resistance gene, Ryd4Hb gene or coding sequence, or SNP as defined in any of statements 1 to 32, for identifying or selecting a barley plant or plant part.
[0151] 66. Use of a polynucleic acid, molecular marker (allele), resistance gene, Ryd4Hb gene or coding sequence, or SNP as defined in any of statements 1 to 32, for identifying or selecting a barley plant or plant part having (improved) resistance (or tolerance) to Barley Yellow Dwarf Virus (BYDV) and/or insects.
[0152] 67. Use according to statement 66, wherein said resistance (or tolerance) is improved compared to Hordeum vulgare reference line Morex v3 or compared to an (near) isogenic line not comprising said molecular marker (allele), polynucleotide, resistance gene, Ryd4Hb gene, or SNP.
[0153] 68. Use according to statement 67, wherein said resistance (or tolerance) is improved by at least 10%, preferably at least 20%, compared to Hordeum vulgare reference line Morex v3 or compared to an (near) isogenic line not comprising said molecular marker (allele), polynucleotide, resistance gene, Ryd4Hb gene, or SNP.
[0154] 69. A (isolated) polynucleotide comprising a polynucleic acid, (molecular) marker (allele), resistance gene, Ryd4Hb gene or coding sequence thereof, or SNP as defined in any of statements 1 to 32, the complement or the reverse complement thereof, or a (unique) fragment thereof.
[0155] 70. A (isolated) polynucleic acid, in particular suitable as molecular marker, comprising at least 15, preferably at least 18, more preferably at least 20, contiguous nucleotides of any of SEQ ID NO: 3 to 9, or complementary to contiguous nucleotides of any of SEQ ID NO: 3 to 9, or reverse complementary to contiguous nucleotides of any of SEQ ID NO: 3 to 9.
[0156] 71. The (isolated) polynucleotide according to statement 69 or 70, which comprises or consists of 10 to 500 nucleotides, preferably 15 to 250 nucleotides, more preferably 18 to 250 nucleotides, most preferably 20 to 250 nucleotides.
[0157] 72. The (isolated) polynucleic acid according to any of statements 69 to 71, in particular suitable as molecular marker, comprising at least 15, preferably at least 18, more preferably at least 20, contiguous nucleotides of any of SEQ ID NO: 3 to 9, or complementary to contiguous nucleotides of any of SEQ ID NO: 3 to 9, or reverse complementary to contiguous nucleotides of any of SEQ ID NO: 3 to 9.
[0158] 73. The (isolated) polynucleic acid according to statement 70 or 72 comprising a SNP as defined in any of statements 17 to 20.
[0159] 74. The (isolated) polynucleotide according to any of statements 69 to 73, which is specific to a plant or plant part having (improved) BYDV or insect resistance (or tolerance).
[0160] 75. A (isolated) polynucleic acid specifically hybridizing with a polynucleic acid, molecular marker (allele), resistance gene, or Ryd4Hbv gene or coding sequence thereof as defined in any of statements 1 to 32, the complement or the reverse complement thereof.
[0161] 76. The (isolated) polynucleic acid according to any of statements 69 to 75, which is a primer or a probe.
[0162] 77. The (isolated) polynucleic acid according to any of statements 69 to 76, which is an allele-specific primer.
[0163] 78. The (isolated) polynucleic acid according to any of statements 69 to 77, which is a KASP primer.
[0164] 79. A primer or probe capable of specifically detecting the polynucleotide, the one or more (molecular) marker (allele), Ryd4Hb gene or coding sequence thereof, or SNP as defined in any of statements 1 to 32.
[0165] 80. A primer set capable of specifically detecting the polynucleotide, the one or more (molecular) marker (allele), resistance gene or locus, Ryd4Hb gene or coding sequence thereof, or SNP as defined in any of statements 1 to 32.

### DESCRIPTION OF THE DRAWINGS

[0166] FIG. 1: Overview of markers, barley chromosome 3H, positions based on barley reference: Morex v3

[0167] FIG. 2: Barley diversity and NLR composition classes at the locus Ryd4Hb. Grey arrows represent partial NLR loci (pseudogenes), black arrows represent complete NLR loci. The black lines represent the interval, lengths are proportional and relate to FIG. 4.

[0168] FIG. 3: Annotated high-confidence genes in Ryd4Hb interval on Morex reference genome (Monat et al 2019), i.e. the Moxex v2 reference genome.

[0169] FIG. 4: Ryd4Hb interval size and NLR composition in barley diversity.

[0170] FIG. 5: Plant material with a reduced H. bulbosum introgression containing Ryd4Hb. B: homozygous for the H. bulbosum allele; V: homozygous for the H. vulgare allele; H: heterozygous.

### DETAILED DESCRIPTION OF THE INVENTION

[0171] Before the present system and method of the invention are described, it is to be understood that this invention is not limited to particular systems and methods or combinations described, since such systems and methods and combinations may, of course, vary. It is also to be understood that the terminology used herein is not intended to be limiting, since the scope of the present invention will be limited only by the appended claims.

[0172] As used herein, the singular forms “a”, “an”, and “the” include both singular and plural referents unless the context clearly dictates otherwise.

[0173] The terms “comprising”, “comprises” and “comprised of” as used herein are synonymous with “including”, “includes” or “containing”, “contains”, and are inclusive or open-ended and do not exclude additional, non-recited members, elements or method steps. It will be appreciated that the terms “comprising”, “comprises” and “comprised of” as used herein comprise the terms “consisting of”, “consists” and “consists of”, as well as the terms “consisting essentially of”, “consists essentially” and “consists essentially of”.

[0174] The recitation of numerical ranges by endpoints includes all numbers and fractions subsumed within the respective ranges, as well as the recited endpoints.

[0175] The term “about” or “approximately” as used herein when referring to a measurable value such as a parameter, an amount, a temporal duration, and the like, is meant to encompass variations of +/−20% or less, preferably +/−10% or less, more preferably +/−5% or less, and still more preferably +/−1% or less of and from the specified value, insofar such variations are appropriate to perform in the disclosed invention. It is to be understood that the value to which the modifier “about” or “approximately” refers is itself also specifically, and preferably, disclosed.

[0176] Whereas the terms “one or more” or “at least one”, such as one or more or at least one member(s) of a group of members, is clear per se, by means of further exemplification, the term encompasses inter alia a reference to any one of said members, or to any two or more of said members, such as, e.g., any >3, >4, >5, >6 or >7 etc. of said members, and up to all said members.

[0177] All references cited in the present specification are hereby incorporated by reference in their entirety. In particular, the teachings of all references herein specifically referred to are incorporated by reference.

[0178] Unless otherwise defined, all terms used in disclosing the invention, including technical and scientific terms, have the meaning as commonly understood by one of ordinary skill in the art to which this invention belongs. By means of further guidance, term definitions are included to better appreciate the teaching of the present invention.

[0179] Standard reference works setting forth the general principles of recombinant DNA technology include Molecular Cloning: A Laboratory Manual, 2nd ed., vol. 1-3, ed. Sambrook et al., Cold Spring Harbor Laboratory Press, Cold Spring Harbor, N.Y., 1989; Current Protocols in Molecular Biology, ed. Ausubel et al., Greene Publishing and Wiley-Interscience, New York, 1992 (with periodic updates) (“Ausubel et al., 1992”); the series Methods in Enzymology (Academic Press, Inc.); Innis et al., PCR Protocols: A Guide to Methods and Applications, Academic Press: San Diego, 1990; PCR 2: A Practical Approach (M. J. MacPherson, B. D. Hames and G. R. Taylor eds. (1995); Harlow and Lane, eds. (1988) Antibodies, a Laboratory Manual; and Animal Cell Culture (R. I. Freshney, ed. (1987). General principles of microbiology are set forth, for example, in Davis, B. D. et al., Microbiology, 3rd edition, Harper & Row, publishers, Philadelphia, Pa. (1980).

[0180] In the following passages, different aspects of the invention are defined in more detail. Each aspect so defined may be combined with any other aspect or aspects unless clearly indicated to the contrary. In particular, any feature indicated as being preferred or advantageous may be combined with any other feature or features indicated as being preferred or advantageous.

[0181] Reference throughout this specification to “one embodiment” or “an embodiment” means that a particular feature, structure or characteristic described in connection with the embodiment is included in at least one embodiment of the present invention. Thus, appearances of the phrases “in one embodiment” or “in an embodiment” in various places throughout this specification are not necessarily all referring to the same embodiment, but may. Furthermore, the particular features, structures or characteristics may be combined in any suitable manner, as would be apparent to a person skilled in the art from this disclosure, in one or more embodiments. Furthermore, while some embodiments described herein include some, but not other features included in other embodiments, combinations of features of different embodiments are meant to be within the scope of the invention, and form different embodiments, as would be understood by those in the art. For example, in the appended claims, any of the claimed embodiments can be used in any combination.

[0182] In the following detailed description of the invention, reference is made to the accompanying drawings that form a part hereof, and in which are shown by way of illustration only of specific embodiments in which the invention may be practiced. It is to be understood that other embodiments may be utilised, and structural or logical changes may be made without departing from the scope of the present invention. The following detailed description, therefore, is not to be taken in a limiting sense, and the scope of the present invention is defined by the appended claims.

[0183] Preferred statements (features) and embodiments of this invention are set herein below. Each of the statements and embodiments of the invention so defined may be combined with any other statement and/or embodiment unless clearly indicated to the contrary. In particular, any feature indicated as being preferred or advantageous may be combined with any other feature or features or statements indicated as being preferred or advantageous.

[0184] The term “plant” includes whole plants, including descendants or progeny thereof. As used herein unless clearly indicated otherwise, the term “plant” intends to mean a plant at any developmental stage. The term “plant part” includes any part or derivative of the plant, including particular plant tissues or structures, plant cells, plant protoplast, plant cell or tissue culture from which plants can be regenerated, plant calli, plant clumps and plant cells that are intact in plants or parts of plants, such as seeds, kernels, cobs, flowers, cotyledons, leaves, stems, buds, roots, root tips, stover, and the like. Plant parts may include processed plant parts or derivatives, including flower, oils, extracts etc. “Parts of a plant” are e.g., shoot vegetative organs/structures, e.g., leaves, stems and tubers; roots, flowers and floral organs/structures, e.g., bracts, sepals, petals, stamens, carpels, anthers and ovules; seed, including embryo, endosperm, and seed coat; fruit and the mature ovary; plant tissue, e.g., vascular tissue, ground tissue, and the like; and cells, e.g., guard cells, egg cells, pollen, trichomes and the like; and progeny of the same. Parts of plants may be attached to or separate from a whole intact plant. Such parts of a plant include, but are not limited to, organs, tissues, and cells of a plant, and preferably seeds. A “plant cell” is a structural and physiological unit of a plant, comprising a protoplast and a cell wall. The plant cell may be in form of an isolated single cell or a cultured cell, or as a part of higher organized unit such as, for example, plant tissue, a plant organ, or a whole plant. “Plant cell culture” means cultures of plant units such as, for example, protoplasts, cell culture cells, cells in plant tissues, pollen, pollen tubes, ovules, embryo sacs, zygotes and embryos at various stages of development. “Plant material” refers to leaves, stems, roots, flowers or flower parts, fruits, pollen, egg cells, zygotes, seeds, cuttings, cell or tissue cultures, or any other part or product of a plant. This also includes callus or callus tissue as well as extracts (such as extracts from taproots) or samples. A “plant organ” is a distinct and visibly structured and differentiated part of a plant such as a root, stem, leaf, flower bud, or embryo. “Plant tissue” as used herein means a group of plant cells organized into a structural and functional unit. Any tissue of a plant in planta or in culture is included. This term includes, but is not limited to, whole plants, plant organs, plant seeds, tissue culture and any groups of plant cells organized into structural and/or functional units. The use of this term in conjunction with, or in the absence of, any specific type of plant tissue as listed above or otherwise embraced by this definition is not intended to be exclusive of any other type of plant tissue. In certain embodiments, the plant part is a plant organ, tissue, or cell. In certain embodiments, the plant part is seed, pollen, oocyte, protoplast, inflorescence, embryo, or callus.

[0185] In certain embodiments, the plant part or derivative is (functional) propagation material, such as germplasm, a seed, or plant embryo or other material from which a plant can be regenerated. In certain embodiments, the plant part or derivative comprises (functional) male and/or female reproductive organs.

[0186] In certain embodiments, the plant part or derivative is not (functional) propagation material, such as germplasm, a seed, or plant embryo or other material from which a plant can be regenerated. In certain embodiments, the plant part or derivative does not comprise (functional) male and female reproductive organs. In certain embodiments, the plant part or derivative is or comprises propagation material, but propagation material which does not or cannot be used (anymore) to produce or generate new plants, such as propagation material which have been chemically, mechanically or otherwise rendered non-functional, for instance by heat treatment, acid treatment, compaction, crushing, chopping, etc.

[0187] As used herein unless clearly indicated otherwise, the term “plant” intended to mean a plant at any developmental stage.

[0188] As used herein, the term “barley” refers to a plant (or plant part) from the genus Hordeum, in particular Hordeum vulgare. As used herein, the term Hordeum refers to the genus Hordeum in the Poaceae family. The term Hordeum may be used herein interchangeably with barley. Non limiting species in the genus Hordeum include H. aegiceras, H. arizonicum, H. bogdanii, H. brachyantherum, H. brachyatherum, H. brevisubulatum, H. bulbosum, H. californicum, H. capense H. chilense, H. comosum, H. cordobense, H. depressum, H. distichon, H. erectifolium, H. euclaston, H. flexuosum, H. fuegianum, H. guatemalense, H. halophilum, H. intercedens, H. jubatum, H.×lagunculciforme, H. lechleri, H. marinum, H. murinum, H. muticum, H. parodii, H. patagonicum, H.×pavisii, H. procerum, H. pubiflorum, H. pusillum, H. roshevitzii, H. secalinum, H. spontaneum, H. stenostachys, H. tetraploidum, H. vulgare; or any subspecies or hybrid thereof, including all ploidy levels, such as diploid. Preferably, the Hordeum species is Hordeum vulgare.

[0189] Preferably, barley as referred to herein is from the species Hordeum vulgare; or any subspecies or hybrid thereof, including all ploidy levels, such as diploid.

[0190] The skilled person will understand that all lines, cultivars, and varieties of the recited species may be included. However, in certain embodiments, the plant or plant part as referred to herein is not a plant variety, line, or cultivar.

[0191] In certain embodiments, the plants or plant parts as referred to herein are hybrids between different species from the Hordeum genus. In certain embodiments, the plants or plant parts as referred to herein are hybrids between different species selected from H. aegiceras, H. arizonicum, H. bogdanii, H. brachyantherum, H. brachyatherum, H. brevisubulatum, H. bulbosum, H. californicum, H. capense H. chilense, H. comosum, H. cordobense, H. depressum, H. distichon, H. erectifolium, H. euclaston, H. flexuosum, H. fuegianum, H. guatemalense, H. halophilum, H. intercedens, H. jubatum, H.×lagunculciforme, H. lechleri, H. marinum, H. murinum, H. muticum, H. parodii, H. patagonicum, H.×pavisii, H. procerum, H. pubiflorum, H. pusillum, H. roshevitzii, H. secalinum, H. spontaneum, H. stenostachys, H. tetraploidum, H. vulgare.

[0192] As used herein, the term “plant (part) population” may be used interchangeably with population of plants or plant parts. A plant (part) population preferably comprises a multitude of individual plants (or plant parts thereof), such as preferably at least 10, such as 20, 30, 40, 50, 60, 70, 80, or 90, more preferably at least 100, such as 200, 300, 400, 500, 600, 700, 800, or 900, even more preferably at least 1000, such as at least 10000 or at least 100000.

[0193] In certain embodiments, the plant population (or plant parts thereof) is a plant line, strain, or variety. In certain embodiments, the plant population (or plant parts thereof) is not a plant line, strain, or variety. In certain embodiments, the plant population (or plant parts thereof) is an inbred plant line, strain, or variety. In certain embodiments, the plant population (or plant parts thereof) is not an inbred plant line, strain, or variety. In certain embodiments, the plant population (or plant parts thereof) is an outbred plant line, strain, or variety. In certain embodiments, the plant population (or plant parts thereof) is not an outbred plant line, strain, or variety.

[0194] The term “elite line” refers to any line that has resulted from breeding and selection for superior agronomic performance. An elite plant is any plant from an elite line.

[0195] As used herein, the terms “progeny” and “progeny plant” refer to a plant generated from vegetative or sexual reproduction from one or more parent plants. In gynogenesis-mediated haploid induction, the haploid embryo on the female parent comprises female chromosomes to the exclusion of male chromosomes-thus it is not a progeny of the male haploid-inducing line. The haploid seed typically still has normal triploid endosperm that contains the male genome. The edited haploid progeny and subsequent edited doubled haploid plants and subsequent seed is not the only desired progeny. There is also the seed from the haploid inducer line itself, often carrying the Cas9 transgene, and subsequent plant and seed progeny of the haploid inducing plant. Both the haploid seed and the haploid inducer (self-pollination-derived) seed can be progeny. A progeny plant can be obtained by cloning or selfing a single parent plant, or by crossing two or more parental plants. For instance, a progeny plant can be obtained by cloning or selfing of a parent plant or by crossing two parental plants and include selfings as well as the F1 or F2 or still further generations. An F1 is a first-generation progeny produced from parents at least one of which is used for the first time as donor of a trait, while progeny of second generation (F2) or subsequent generations (F3, F4, and the like) are specimens produced from selfings, intercrosses, backcrosses, and/or other crosses of F1s, F2s, and the like. An F1 can thus be (and in some embodiments is) a hybrid resulting from a cross between two true breeding parents (i.e., parents that are true-breeding are each homozygous for a trait of interest or an allele thereof), while an F2 can be (and in some embodiments is) a progeny resulting from self-pollination of the F1 hybrids. The term “progeny” can in certain embodiments be used interchangeably with “offspring”, in particular when the plant or plant material is derived from sexual crossing of parent plants.

[0196] Preferably, in crosses between a first plant and a second plant, both plants are from the same genus, preferably from the same species. However, interspecies crosses are also possible.

[0197] An “amplicon” is amplified nucleic acid, e.g., a nucleic acid that is produced by amplifying a template nucleic acid by any available amplification method (e.g., PCR, LCR, transcription, or the like).

[0198] The term “amplifying” in the context of nucleic acid amplification is any process whereby additional copies of a selected nucleic acid for a transcribed form thereof are produced. Typical amplification methods include various polymerase-based replication methods, including the polymerase chain reaction (PCR), ligase mediated methods such as the ligase chain reaction (LCR) and RNA polymerase-based amplification (e.g., by transcription) methods.

[0199] The term “locus” (loci plural) means a specific place or places or a site on a chromosome where for example a QTL, a gene or genetic marker is found. As used herein, the term “quantitative trait locus” or “QTL” has its ordinary meaning known in the art. By means of further guidance, and without limitation, a QTL may refer to a region of DNA that is associated with the differential expression of a quantitative phenotypic trait in at least one genetic background, e.g., in at least one breeding population. The region of the QTL encompasses or is closely linked to the gene or genes that affect the trait in question.

[0200] An “allele of a locus/QTL” can comprise multiple genes or other genetic factors within a contiguous genomic region or linkage group, such as a haplotype. An allele of a locus/QTL can denote a haplotype within a specified window wherein said window is a contiguous genomic region that can be defined, and tracked, with a set of one or more polymorphic markers. A haplotype can be defined by the unique fingerprint of alleles at each marker within the specified window. A locus/QTL may encode for one or more alleles that affect the expressivity of a continuously distributed (quantitative) phenotype. In certain embodiments, the locus/QTL as described herein may be homozygous. In certain embodiments, the locus/QTL as described herein may be heterozygous.

[0201] As used herein, the term “allele” or “alleles” refers to one or more alternative forms, i.e., different nucleotides or nucleotide sequences, of a locus, such as a gene, marker, QTL, SNP, etc.

[0202] A “favourable allele” is the allele at a particular locus that confers, or contributes to, a desirable phenotype, e.g., increased BYDV resistance as described somewhere else herein, or alternatively, is an allele that allows the identification of plants with decreased disease resistance that can be removed from a breeding program or planting (“counter-selection”). A favourable allele of a marker is a marker allele that segregates with the favourable phenotype, or alternatively, segregates with the unfavourable plant phenotype, therefore providing the benefit of identifying plants.

[0203] As used herein, the term “mutant alleles” or “mutation” of alleles include alleles having one or more mutations, such as insertions, deletions, stop codons, base changes (e.g., transitions or transversions), or alterations in splice junctions, which may or may not give rise to altered gene products. Modifications in alleles may arise in coding or non-coding regions (e.g., promoter regions, exons, introns or splice junctions).

[0204] The term “mutation” or “mutated” as used herein refers to a gene or protein product thereof which is altered or modified such that the function normally attributed to the gene or protein product thereof is altered, or alternatively such that the expression, stability, and/or activity normally associated with the gene or protein product thereof is altered. Typically, a mutation as referred to herein results in a phenotypic effect, such as resistance, as described herein elsewhere. It will be understood that a mutation in a gene or protein product thereof is referred to in comparison with a gene or protein product thereof not having such mutation, such as a wild type or endogenous gene or protein product thereof. Typically, a mutation refers to a modification at the DNA level and includes changes in the genetics and/or epigenetics. An alteration in the genetics may include an insertion, a deletion, an introduction of a stop codon, a base change (e.g., transition or transversion), or an alteration in splice junctions. These alterations may arise in coding or non-coding regions (e.g., promoter regions, exons, introns or splice junctions) of the endogenous DNA sequence. For example, an alteration in the genetics may be the exchange (including insertions, deletions) of at least one nucleotide in the endogenous DNA sequence or in a regulatory sequence of the endogenous DNA sequence. If such a nucleotide exchange takes place in a promoter, for example, this may lead to an altered activity of the promoter, since, for example, cis-regulator elements are modified such that the affinity of a transcription factor to the mutated cis-regulatory elements is altered in comparison to the wild-type promoter, so that the activity of the promoter with the mutated cis-regulatory elements is increased or reduced, depending upon whether the transcription factor is a repressor or inductor, or whether the affinity of the transcription factor to the mutated cis-regulatory elements is intensified or weakened. If such a nucleotide exchange occurs, e.g., in an encoding region of the endogenous DNA sequence, this may lead to an amino acid exchange in the encoded protein, which may produce an alteration in the activity or stability of the protein, in comparison to the wild-type protein. An alteration in the epigenetics may take place via an altered methylation pattern of the DNA. In certain embodiments, a mutation as referred to herein relates to the insertion of one or more nucleotides in a gene. In certain embodiments, a mutation as referred to herein relates to the deletion of one or more nucleotides in a gene. In certain embodiments, the mutation as referred to herein relates to the deletion as well as the insertion of one or more nucleotides. In certain embodiments, certain nucleotide stretches, such as for instance encoding a particular protein domain are deleted. In certain embodiments, certain nucleotide stretches, such as for instance encoding a particular protein domain are deleted and replaced by nucleotide sequences encoding a different protein domain. In certain embodiments, a mutation as referred to herein relates to the exchange of one or more nucleotides in a gene by different nucleotides. In certain embodiments, the mutation is a nonsense mutation (i.e., the mutation results in the generation of a stop codon in a protein encoding sequence). In certain embodiments, the mutation is a frameshift mutation (i.e., an insertion or deletion of one or more nucleotides (not equal to three or a product thereof) in a protein encoding sequence). In certain embodiments, the mutation results in a truncated protein product. In certain embodiments, the mutation results in an N-terminally truncated protein product. In certain embodiments, the mutation results in a C-terminally truncated protein product. In certain embodiments, the mutation results in an N-terminally and C-terminally truncated protein product. In certain embodiments, the mutation results in an altered splice site (such as an altered splice donor and/or splice acceptor site). In certain embodiments, the mutation is in an exon. In certain embodiments, the mutation is in an intron. In certain embodiments, the mutation is in a regulatory sequence, such as a promoter. In certain embodiments, the mutation results in a codon encoding a different amino acid. In certain embodiments, the mutation results in the insertion or deletion of one or more codons (i.e., nucleotide triplets). In certain embodiments, the mutation results in gene deletion. In certain embodiments, the mutation is a knockout mutation. Both frameshift and nonsense mutations can in certain embodiments be considered as knockout mutations, in particular if the mutation is present in an early exon. A knockout mutation (or loss of function mutation) as used herein preferably means that a functional gene product, such as a functional protein, is not produced anymore. In particular, frameshift and nonsense mutations will lead to premature termination of protein translation, such that a truncated protein will result, which often lacks the required stability and/or activity to perform the function naturally attributed to it. In certain embodiments, the mutation is a knockdown mutation. Knockout mutations often, and according to the present invention preferably are recessive. In contrast to a knockout mutation, a knockdown mutation results in a decreased activity, stability, and/or expression (rate) of the native functional gene product, such as a protein, and thereby ultimately in a decreased functionality. For instance, mutations in promoter regions affecting transcriptional activator binding (or other regulatory sequences), in particular reducing transcription rate, can be considered knockdown mutations. Also, mutations negatively affecting protein stability (such as to increase ubiquitination and subsequent protein degradation) can be considered knockdown mutations). In addition, mutations negatively affecting protein activity (such as binding strength or enzymatic activity) can be considered knockdown mutations. It will be understood that the mutations described herein according to the invention confer haploid inducer or inducing activity or capability or enhance haploid inducer or inducing activity or capability, as described herein elsewhere. While mutation described herein may be non-naturally occurring, this need not necessarily be the case.

[0205] A “reference sequence” is a defined sequence used as a basis for sequence comparison. The reference sequence is obtained by genotyping a number of lines at the locus, aligning the nucleotide sequences in a sequence alignment program, and obtaining the consensus sequence of the alignment.

[0206] The barley Morex version 3.0 (v3.0 or v3) reference genome (also referred to herein as “Morex v3”) as referred to herein (also called barley Morex v3 pseudomolecules reference sequence or reference genome sequence assembly of Barley cultivar Morex v3.0 (July 2020)) was published in Mascher et al., (2021) “Long-read sequence assembly: a technical evaluation in barley”; Plant Cell; 33(6): 1888-1906 (https://doi.org/10.1093/plcell/koab077). The sequence can for instance be consulted in the GrainGenes database (https://wheat.pw.usda.gov/GG3/ or https://wheat.pw.usda.gov/jb/).

[0207] The barley Morex version 2.0 (v2.0 or v2) reference genome (also referred to herein as “Morex v2”) as referred to herein (also called barley Morex v2 pseudomolecules reference sequence or reference genome sequence assembly of Barley cultivar Morex v2.0) was published in Monat et al., (2019) “TRITEX: chromosome-scale sequence assembly of Triticeae genomes with open-source tools”; Genome Biol; 20, 284 (https://doi.org/10.1186/s13059-019-1899-5). The sequence can for instance be consulted in the GrainGenes database (https://wheat.pw.usda.gov/GG3/ or https://wheat.pw.usda.gov/jb/).In certain embodiments, the polynucleotide, QTL, locus, or markers as referred to herein are homozygous. In certain embodiments, the polynucleotide, QTL, locus, or markers as referred to herein are heterozygous.

[0208] Homozygosity may be achieved by breeding and selection, such as crossing heterozygous plants and selecting homozygous offspring, such as backcrossing and selecting for homozygosity. Also, homozygosity may be achieved by (recombinant) introduction of the polynucleotide, QTL, locus, markers, or SNPs of the invention gene simultaneously or sequentially on both homologous chromosomes. Alternatively, homozygosity may be achieved by doubled haploid technology.

[0209] In certain embodiments, a wild type/endogenous allele is replaced by a resistance allele of the invention, preferably all wild type/endogenous alleles are replaced by a resistance allele of the invention. Replacement can be effected by any means known in the art, as also described herein elsewhere. Replacement, as used herein also includes (direct) mutagenesis of the wild type/endogenous allele(s) at its native genomic locus. Accordingly, in certain embodiments, a wild type/endogenous allele is mutated, as described herein elsewhere, optionally all wild type/endogenous alleles are mutated. The skilled person will understand that only one copy of a wild type/endogenous allele may be mutated, and that homozygosity (if so desired) may be obtained by selfing and subsequent selection. In certain embodiments, a reduced number of wild type/endogenous alleles is present (i.e., the wild type/endogenous allele is heterozygous).

[0210] According to the invention, mutations as described herein may be constitutive or conditional or inducible, and/or may be (multiple or single) tissue, organ, or cell (type) specific. The skilled person has ample knowledge how to implement such (differential) mutagenesis.

[0211] Mutations as described herein may be introduced by mutagenesis, which may be performed in accordance with any of the techniques known in the art. As used herein, “mutagenization”, “mutagenized” or “mutagenesis” includes both conventional mutagenesis and location-specific mutagenesis or “genome editing” or “gene editing”. In conventional mutagenesis, modification at the DNA level is not produced in a targeted manner. The plant cell or the plant is exposed to mutagenic conditions, such as TILLING, via UV light exposure or the use of chemical substances (Till et al., 2004). An additional method of random mutagenesis is mutagenesis with the aid of a transposon. Location-specific mutagenesis enables the introduction of modification at the DNA level in a target-oriented manner at predefined locations in the DNA. For example, TALENS, meganucleases, homing endonucleases, zinc finger nucleases, or a CRISPR/Cas system as further described herein may be used for this.

[0212] In certain embodiments, a wild type/endogenous allele is knocked out, optionally all wild type/endogenous alleles are knocked out, and a polynucleotide, QTL, locus, marker, or allele as described herein is transgenically introduced, transiently or genomically integrated, preferably genomically integrated. In certain embodiments, a wild type/endogenous allele is knocked out, optionally all wild type/endogenous alleles are knocked out, and is transgenically replaced by a polynucleotide, QTL, locus, marker, or allele as described herein (at the native genomic location of the wild type allele). The skilled person will understand that only one copy of a wild type/endogenous allele may be knocked out and that homozygosity (if so desired) may be obtained by selfing and subsequent selection.

[0213] In certain embodiments, the mutations as described herein, are or result in amino acid substitutions (compared to the wild type or unmutated protein, gene, or coding sequence). In certain embodiments, the mutation is a point mutation. Preferably, the mutation is a missense mutation (i.e., the mutation results in a codon encoding a different amino acid). In certain embodiments one or more mutations are present. In certain embodiments, from 1 to 10 mutations are present. In certain embodiments, from 1 to 9 mutations are present. In certain embodiments, from 1 to 8 mutations are present. In certain embodiments, from 1 to 7 mutations are present. In certain embodiments, from 1 to 6 mutations are present. In certain embodiments, from 1 to 5 mutations are present. In certain embodiments, from 1 to 4 mutations are present. In certain embodiments, from 1 to 3 mutations are present. In certain embodiments, from 1 to 2 mutations are present. In certain embodiments, 1 mutation is present. In certain embodiments, from 1 to 10 amino acid substitutions are present in the mutated protein. In certain embodiments, from 1 to 9 amino acid substitutions are present in the mutated protein. In certain embodiments, from 1 to 8 amino acid substitutions are present in the mutated protein. In certain embodiments, from 1 to 7 amino acid substitutions are present in the mutated protein. In certain embodiments, from 1 to 6 amino acid substitutions are present in the mutated protein. In certain embodiments, from 1 to 5 amino acid substitutions are present in the mutated protein. In certain embodiments, from 1 to 4 amino acid substitutions are present in the mutated protein. In certain embodiments, from 1 to 3 amino acid substitutions are present in the mutated protein. In certain embodiments, from 1 to 2 amino acid substitutions are present in the mutated protein. In certain embodiments, 1 amino acid substitution is present in the mutated protein. In certain embodiments, from 1 to 10 point mutations, preferably missense mutations, are present in the mutated gene, allele, or coding sequence. In certain embodiments, from 1 to 9 point mutations, preferably missense mutations, are present in the mutated gene, allele, or coding sequence. In certain embodiments, from 1 to 8 point mutations, preferably missense mutations, are present in the mutated gene, allele, or coding sequence. In certain embodiments, from 1 to 7 point mutations, preferably missense mutations, are present in the mutated gene, allele, or coding sequence. In certain embodiments, from 1 to 6 point mutations, preferably missense mutations, are present in the mutated gene, allele, or coding sequence. In certain embodiments, from 1 to 5 point mutations, preferably missense mutations, are present in the mutated gene, allele, or coding sequence. In certain embodiments, from 1 to 4 point mutations, preferably missense mutations, are present in the mutated gene, allele, or coding sequence. In certain embodiments, from 1 to 3 point mutations, preferably missense mutations, are present in the mutated gene, allele, or coding sequence. In certain embodiments, from 1 to 2 point mutations, preferably missense mutations, are present in the mutated gene, allele, or coding sequence. In certain embodiments, 1 point mutation, preferably missense mutation, is present in the mutated gene, allele, or coding sequence.

[0214] As used herein, the terms “introgression”, “introgressed” and “introgressing” refer to both a natural and artificial process whereby chromosomal fragments or genes of one species, variety or cultivar are moved into the genome of another species, variety or cultivar, by crossing those species. The process may optionally be completed by backcrossing to the recurrent parent. For example, introgression of a desired allele at a specified locus can be transmitted to at least one progeny via a sexual cross between two parents of the same species, where at least one of the parents has the desired allele in its genome. Alternatively, for example, transmission of an allele can occur by recombination between two donor genomes, e.g., in a fused protoplast, where at least one of the donor protoplasts has the desired allele in its genome. The desired allele can be, e.g., detected by a marker that is associated with a phenotype, at a QTL, a transgene, or the like. In any case, offspring comprising the desired allele can be repeatedly backcrossed to a line having a desired genetic background and selected for the desired allele, to result in the allele becoming fixed in a selected genetic background. The process of “introgressing” is often referred to as “backcrossing” when the process is repeated two or more times. “Introgression fragment” or “introgression segment” or “introgression region” refers to a chromosome fragment (or chromosome part or region) which has been introduced into another plant of the same or related species either artificially or naturally such as by crossing or traditional breeding techniques, such as backcrossing, i.e., the introgressed fragment is the result of breeding methods referred to by the verb “to introgress” (such as backcrossing). It is understood that the term “introgression fragment” never includes a whole chromosome, but only a part of a chromosome. The introgression fragment can be large, e.g., even three quarter or half of a chromosome, but is preferably smaller, such as about 15 Mb or less, such as about 10 Mb or less, about 9 Mb or less, about 8 Mb or less, about 7 Mb or less, about 6 Mb or less, about 5 Mb or less, about 4 Mb or less, about 3 Mb or less, about 2.5 Mb or 2 Mb or less, about 1 Mb (equals 1,000,000 base pairs) or less, or about 0.5 Mb (equals 500,000 base pairs) or less, such as about 200,000 bp (equals 200 kilo base pairs) or less, about 100,000 bp (100 kb) or less, about 50,000 bp (50 kb) or less, about 25,000 bp (25 kb) or less.

[0215] In certain embodiments, the polynucleotide, QTL, locus, marker, SNP, or allele of the invention is introduced by introgression.

[0216] The term “crossed” or “cross” means the fusion of gametes via pollination to produce progeny (e.g., cells, seeds or plants). The term encompasses both sexual crosses (the pollination of one plant by another) and selfing (self-pollination, e.g., when the pollen and ovule are from the same plant). The term “crossing” refers to the act of fusing gametes via pollination to produce progeny.

[0217] “Backcrossing” refers to the process whereby the hybrid progeny is repeatedly crossed back to one of the parents. In a backcrossing scheme, the “donor” parent refers to the parental plant with the desired gene or locus to be introgressed. The “recipient” parent (used one or more times) or “recurrent” parent (used two or more times) refers to the parental plant into which the gene or locus is being introgressed.

[0218] A genetic element, an introgression fragment, a locus, QTL or a gene or allele conferring a trait is said to be “obtainable from” or can be “obtained from” or “derivable from” or can be “derived from” or “as present in” or “as found in” a plant or plant part as described herein elsewhere if it can be transferred from the plant in which it is present into another plant in which it is not present (such as a line or variety) using traditional breeding techniques without resulting in a phenotypic change of the recipient plant apart from the addition of the trait conferred by the genetic element, locus, introgression fragment, gene or allele. The terms are used interchangeably and the genetic element, locus, introgression fragment, gene or allele can thus be transferred into any other genetic background lacking the trait. Not only pants comprising the genetic element, locus, introgression fragment, gene or allele can be used, but also progeny/descendants from such plants which have been selected to retain the genetic element, locus, introgression fragment, gene or allele, can be used and are encompassed herein. Whether a plant (or genomic DNA, cell or tissue of a plant) comprises the same genetic element, locus, introgression fragment, gene or allele as obtainable from such plant can be determined by the skilled person using one or more techniques known in the art, such as phenotypic assays, whole genome sequencing, molecular marker analysis, trait mapping, chromosome painting, allelism tests and the like, or combinations of techniques. It will be understood that transgenic plants may also be encompassed.

[0219] “Introducing” in the meaning of the present invention includes stable or transient integration by means of transformation including Agrobacterium-mediated transformation, transfection, microinjection, biolistic bombardment, insertion using gene editing technology like CRISPR systems (e.g., CRISPR/Cas, in particular CRISPR/Cas9 or CRISPR/Cas12), CRISPR/CasX, or CRISPR/CasY), TALENs, zinc finger nucleases or meganucleases, homologous recombination optionally by means of one of the below mentioned gene editing technology including preferably a repair template, modification of endogenous gene using random or targeted mutagenesis like TILLING or above mentioned gene editing technology, etc.

[0220] As used herein the terms “genetic engineering”, “transformation” and “genetic modification” are all used herein as synonyms for the transfer of isolated and cloned genes into the DNA, usually the chromosomal DNA or genome, of another organism.

[0221] “Transgenic” or “genetically modified organisms” (GMOs) as used herein are organisms whose genetic material has been altered using techniques generally known as “recombinant DNA technology”. Recombinant DNA technology encompasses the ability to combine DNA molecules from different sources into one molecule ex vivo (e.g., in a test tube). The term “transgenic” here means genetically modified by the introduction of a non-endogenous nucleic acid sequence.

[0222] Typically, a species-specific nucleic acid sequence is introduced in a form, arrangement, or quantity into the cell in a location where the nucleic acid sequence does not occur naturally in the cell. This terminology generally does not cover organisms whose genetic composition has been altered by conventional cross-breeding or by “mutagenesis” breeding, as these methods predate the discovery of recombinant DNA techniques. “Non-transgenic” as used herein refers to plants and food products derived from plants that are not “transgenic” or “genetically modified organisms” as defined above.

[0223] “Transgene”, “exogene”, or “chimeric gene” refers to a genetic locus comprising a DNA sequence, such as a recombinant gene, which has been introduced into the genome of a plant by transformation, such as Agrobacterium mediated transformation. A plant comprising a transgene stably integrated into its genome is referred to as “transgenic plant”.

[0224] “Gene editing” or “genome editing” refers to genetic engineering in which in which DNA or RNA is inserted, deleted, modified or replaced in the genome of a living organism. Gene editing may comprise targeted or non-targeted (random) mutagenesis. Targeted mutagenesis may be accomplished for instance with designer nucleases, such as for instance with meganucleases, zinc finger nucleases (ZFNs), transcription activator-like effector-based nucleases (TALEN), and the clustered regularly interspaced short palindromic repeats (CRISPR/Cas) system. These nucleases create site-specific double-strand breaks (DSBs) at desired locations in the genome. The induced double-strand breaks are repaired through nonhomologous end-joining (NHEJ) or homologous recombination (HR), resulting in targeted mutations or nucleic acid modifications, such as introduction of the polynucleotide, QTL, locus, marker, or allele as described herein. The use of designer nucleases is particularly suitable for generating gene knockouts or knockdowns. In certain embodiments, designer nucleases are developed which specifically introduce a polynucleic acid, QTL, locus, marker, or induce a mutation, as described herein elsewhere, such as to generate a mutation or a knockout or knockin of a gene. Alternatively, by means of for instance RNA-specific CRISPR/Cas systems, a knockdown can be achieved, as RNA/specific CRISPR/Cas systems (such as Cas13) allow site-directed cleavage of (single-stranded) RNA. Accordingly, in certain embodiments, designer nucleases, in particular RNA-specific CRISPR/Cas systems are developed which specifically target the mRNA, such as to cleave mRNA and generate a knockdown of the gene/mRNA/protein. Delivery and expression systems of designer nuclease systems are well known in the art.

[0225] In certain embodiments, the nuclease or targeted/site-specific/homing nuclease is, comprises, consists essentially of, or consists of a (modified) CRISPR/Cas system or complex, a (modified) Cas protein, a (modified) zinc finger, a (modified) zinc finger nuclease (ZFN), a (modified) transcription factor-like effector (TALE), a (modified) transcription factor-like effector nuclease (TALEN), or a (modified) meganuclease. In certain embodiments, said (modified) nuclease or targeted/site-specific/homing nuclease is, comprises, consists essentially of, or consists of a (modified) RNA-guided nuclease. It will be understood that in certain embodiments, the nucleases may be codon optimized for expression in plants. As used herein, the term “targeting” of a selected nucleic acid sequence means that a nuclease or nuclease complex is acting in a nucleotide sequence specific manner. For instance, in the context of the CRISPR/Cas system, the guide RNA is capable of hybridizing with a selected nucleic acid sequence. As uses herein, “hybridization” or “hybridizing” refers to a reaction in which one or more polynucleotides react to form a complex that is stabilized via hydrogen bonding between the bases of the nucleotide residues, i.e., a process in which a single-stranded nucleic acid molecule attaches itself to a complementary nucleic acid strand, i.e., agrees with this base pairing. Standard procedures for hybridization are described, for example, in Sambrook et al., (Molecular Cloning. A Laboratory Manual, Cold Spring Harbor Laboratory Press, 3rd edition 2001). The hydrogen bonding may occur by Watson Crick base pairing, Hoogstein binding, or in any other sequence specific manner. The complex may comprise two strands forming a duplex structure, three or more strands forming a multi stranded complex, a single self-hybridizing strand, or any combination of these. A hybridization reaction may constitute a step in a more extensive process, such as the initiation of PGR, or the cleavage of a polynucleotide by an enzyme. A sequence capable of hybridizing with a given sequence is referred to as the “complement” of the given sequence. Preferably this will be understood to mean an at least 50%, more preferably at least 55%, 60%, 65%, 70%, 75%, 80% or 85%, more preferably 90%, 91%, 92%, 93%, 94%, 95%, 96%, 97%, 98% or 99% of the bases of the nucleic acid strand form base pairs with the complementary nucleic acid strand. The possibility of such binding depends on the stringency of the hybridization conditions.

[0226] Gene editing may involve transient, inducible, or constitutive expression of the gene editing components or systems. Gene editing may involve genomic integration or episomal presence of the gene editing components or systems. Gene editing components or systems may be provided on vectors, such as plasmids, which may be delivered by appropriate delivery vehicles, as is known in the art. Preferred vectors are expression vectors.

[0227] Gene editing may comprise the provision of recombination templates, to effect homology directed repair (HDR). For instance, a genetic element may be replaced by gene editing in which a recombination template is provided. The DNA may be cut upstream and downstream of a sequence which needs to be replaced. As such, the sequence to be replaced is excised from the DNA. Through HDR, the excised sequence is then replaced by the template. In certain embodiments, the QTL allele of the invention as described herein may be provided on/as a template. By designing the system such that double strand breaks are introduced upstream and downstream of the corresponding region in the genome of a plant, this region is excised and can be replaced with the template comprising the polynucleotide, QTL, locus, marker, or allele as described herein. In this way, introduction of the polynucleotide, QTL, locus, marker, or allele as described herein in a plant need not involve multiple backcrossing, in particular in a plant of specific genetic background. Similarly, the polynucleic acid of the invention may be provided on/as a template. More advantageously however, the polynucleic acid of the invention may be generated without the use of a recombination template, but solely through the endonuclease action leading to a double strand DNA break which is repaired by NHEJ, resulting in the generation of indels.

[0228] In certain embodiments, the nucleic acid modification, such as introduction of the polynucleotide, QTL, locus, marker, or allele as described herein, or mutation is effected by a (modified) transcription activator-like effector nuclease (TALEN) system. Transcription activator-like effectors (TALEs) can be engineered to bind practically any desired DNA sequence. Exemplary methods of genome editing using the TALEN system can be found for example in Cermak T. Doyle E L., Christian M., Wang L., Zhang Y., Schmidt C, et al., Efficient design and assembly of custom TALEN and other TAL effector-based constructs for DNA targeting. Nucleic Acids Res. 2011; 39:e82; Zhang F., Cong L., Lodato S., Kosuri S., Church G M., Arlotta P, Efficient construction of sequence-specific TAL effectors for modulating mammalian transcription. Nat Biotechnol. 2011; 29:149-153 and U.S. Pat. Nos. 8,450,471, 8,440,431 and 8,440,432, all of which are specifically incorporated by reference. By means of further guidance, and without limitation, naturally occurring TALEs or “wild type TALEs” are nucleic acid binding proteins secreted by numerous species of proteobacteria. TALE polypeptides contain a nucleic acid binding domain composed of tandem repeats of highly conserved monomer polypeptides that are predominantly 33, 34 or 35 amino acids in length and that differ from each other mainly in amino acid positions 12 and 13. In advantageous embodiments the nucleic acid is DNA. As used herein, the term “polypeptide monomers”, or “TALE monomers” will be used to refer to the highly conserved repetitive polypeptide sequences within the TALE nucleic acid binding domain and the term “repeat variable di-residues” or “RVD” will be used to refer to the highly variable amino acids at positions 12 and 13 of the polypeptide monomers. As provided throughout the disclosure, the amino acid residues of the RVD are depicted using the IUPAC single letter code for amino acids. A general representation of a TALE monomer which is comprised within the DNA binding domain is X1-11-(X12X13)-X14-33 or 34 or 35, where the subscript indicates the amino acid position and X represents any amino acid. X12X13 indicate the RVDs. In some polypeptide monomers, the variable amino acid at position 13 is missing or absent and in such polypeptide monomers, the RVD consists of a single amino acid. In such cases the RVD may be alternatively represented as X*, where X represents X12 and (*) indicates that X13 is absent. The DNA binding domain comprises several repeats of TALE monomers and this may be represented as (X1-11-(X12X13)-X14-33 or 34 or 35)z, where in an advantageous embodiment, z is at least 5 to 40. In a further advantageous embodiment, z is at least 10 to 26. The TALE monomers have a nucleotide binding affinity that is determined by the identity of the amino acids in its RVD. For example, polypeptide monomers with an RVD of NI preferentially bind to adenine (A), polypeptide monomers with an RVD of NG preferentially bind to thymine (T), polypeptide monomers with an RVD of HD preferentially bind to cytosine (C) and polypeptide monomers with an RVD of NN preferentially bind to both adenine (A) and guanine (G). In yet another embodiment of the invention, polypeptide monomers with an RVD of IG preferentially bind to T. Thus, the number and order of the polypeptide monomer repeats in the nucleic acid binding domain of a TALE determines its nucleic acid target specificity. In still further embodiments of the invention, polypeptide monomers with an RVD of NS recognize all four base pairs and may bind to A, T, G or C. The structure and function of TALEs is further described in, for example, Moscou et al., Science 326:1501 (2009); Boch et al., Science 326:1509-1512 (2009); and Zhang et al., Nature Biotechnology 29:149-153 (2011), each of which is incorporated by reference in its entirety.

[0229] In certain embodiments, the nucleic acid modification, such as introduction of the polynucleotide, QTL, locus, marker, or allele as described herein, or mutation is effected by a (modified) zinc-finger nuclease (ZFN) system. The ZFN system uses artificial restriction enzymes generated by fusing a zinc finger DNA-binding domain to a DNA-cleavage domain that can be engineered to target desired DNA sequences. Exemplary methods of genome editing using ZFNs can be found for example in U.S. Pat. Nos. 6,534,261, 6,607,882, 6,746,838, 6,794,136, 6,824,978, 6,866,997, 6,933,113, 6,979,539, 7,013,219, 7,030,215, 7,220,719, 7,241,573, 7,241,574, 7,585,849, 7,595,376, 6,903,185, and 6,479,626, all of which are specifically incorporated by reference. By means of further guidance, and without limitation, artificial zinc-finger (ZF) technology involves arrays of ZF modules to target new DNA-binding sites in the genome. Each finger module in a ZF array targets three DNA bases. A customized array of individual zinc finger domains is assembled into a ZF protein (ZFP). ZFPs can comprise a functional domain. The first synthetic zinc finger nucleases (ZFNs) were developed by fusing a ZF protein to the catalytic domain of the Type IIS restriction enzyme FokI. (Kim, Y. G. et al., 1994, Chimeric restriction endonuclease, Proc. Natl. Acad. Sci. U.S.A. 91, 883-887; Kim, Y. G. et al., 1996, Hybrid restriction enzymes: zinc finger fusions to Fok I cleavage domain. Proc. Natl. Acad. Sci. U.S.A. 93, 1156-1160). Increased cleavage specificity can be attained with decreased off target activity by use of paired ZFN heterodimers, each targeting different nucleotide sequences separated by a short spacer. (Doyon, Y. et al., 2011, Enhancing zinc-finger-nuclease activity with improved obligate heterodimeric architectures. Nat. Methods 8, 74-79). ZFPs can also be designed as transcription activators and repressors and have been used to target many genes in a wide variety of organisms.

[0230] In certain embodiments, the nucleic acid modification, such as introduction of the polynucleotide, QTL, locus, marker, or allele as described herein is effected by a (modified) meganuclease, which are endodeoxyribonucleases characterized by a large recognition site (double-stranded DNA sequences of 12 to 40 base pairs). Exemplary method for using meganucleases can be found in U.S. Pat. Nos. 8,163,514; 8,133,697; 8,021,867; 8,119,361; 8,119,381; 8,124,369; and 8,129,134, which are specifically incorporated by reference.

[0231] In certain embodiments, the nucleic acid modification is effected by a (modified) CRISPR/Cas complex or system. With respect to general information on CRISPR/Cas Systems, components thereof, and delivery of such components, including methods, materials, delivery vehicles, vectors, particles, and making and using thereof, including as to amounts and formulations, as well as Cas9CRISPR/Cas-expressing eukaryotic cells, Cas-9 CRISPR/Cas expressing eukaryotes, such as a mouse, reference is made to: Multiplex genome engineering using CRISPR/Cas systems. Cong, L., Ran, F. A., Cox, D., Lin, S., Barretto, R., Habib, N., Hsu, P. D., Wu, X., Jiang, W., Marraffini, L. A., & Zhang, F. Science February 15; 339(6121):819-23 (2013); RNA-guided editing of bacterial genomes using CRISPR-Cas systems. Jiang W., Bikard D., Cox D., Zhang F, Marraffini L A. Nat Biotechnol March; 31(3):233-9 (2013); One-Step Generation of Mice Carrying Mutations in Multiple Genes by CRISPR/Cas-Mediated Genome Engineering. Wang H., Yang H., Shivalila C S., Dawlaty M M., Cheng A W., Zhang F., Jaenisch R. Cell May 9; 153(4):910-8 (2013); Optical control of mammalian endogenous transcription and epigenetic states. Konermann S, Brigham M D, Trevino A E, Hsu P D, Heidenreich M, Cong L, Platt R J, Scott D A, Church G M, Zhang F. Nature. 2013 Aug. 22; 500(7463):472-6. doi: 10.1038/Nature12466. Epub 2013 Aug. 23; Double Nicking by RNA-Guided CRISPR Cas9 for Enhanced Genome Editing Specificity. Ran, F A., Hsu, P D., Lin, C Y., Gootenberg, J S., Konermann, S., Trevino, A E., Scott, D A., Inoue, A., Matoba, S., Zhang, Y., & Zhang, F. Cell August 28. pii: S0092-8674(13)01015-5. (2013); DNA targeting specificity of RNA-guided Cas9 nucleases. Hsu, P., Scott, D., Weinstein, J., Ran, F A., Konermann, S., Agarwala, V., Li, Y., Fine, E., Wu, X., Shalem, O., Cradick, T J., Marraffini, L A., Bao, G., & Zhang, F. Nat Biotechnol doi:10.1038/nbt.2647 (2013); Genome engineering using the CRISPR-Cas9 system. Ran, F A., Hsu, P D., Wright, J., Agarwala, V., Scott, D A., Zhang, F. Nature Protocols November; 8(11):2281-308. (2013); Genome-Scale CRISPR-Cas9 Knockout Screening in Human Cells. Shalem, O., Sanjana, N E., Hartenian, E., Shi, X., Scott, D A., Mikkelson, T., Heckl, D., Ebert, B L., Root, D E., Doench, J G., Zhang, F. Science December 12. (2013). [Epub ahead of print]; Crystal structure of cas9 in complex with guide RNA and target DNA. Nishimasu, H., Ran, F A., Hsu, P D., Konermann, S., Shehata, S I., Dohmae, N., Ishitani, R., Zhang, F., Nureki, O. Cell February 27. (2014). 156(5):935-49; Genome-wide binding of the CRISPR endonuclease Cas9 in mammalian cells. Wu X., Scott D A., Kriz A J., Chiu A C., Hsu P D., Dadon D B., Cheng A W., Trevino A E., Konermann S., Chen S., Jaenisch R., Zhang F., Sharp P A. Nat Biotechnol. (2014) April 20. doi: 10.1038/nbt.2889; CRISPR-Cas9 Knockin Mice for Genome Editing and Cancer Modeling, Platt et al., Cell 159(2): 440-455 (2014) DOI: 10.1016/j.cell.2014.09.014; Development and Applications of CRISPR-Cas9 for Genome Engineering, Hsu et al., Cell 157, 1262-1278 (Jun. 5, 2014) (Hsu 2014); Genetic screens in human cells using the CRISPR/Cas9 system, Wang et al., Science. 2014 Jan. 3; 343(6166): 80-84. doi:10.1126/science.1246981; Rational design of highly active sgRNAs for CRISPR-Cas9-mediated gene inactivation, Doench et al., Nature Biotechnology 32(12):1262-7 (2014) published online 3 Sep. 2014; doi:10.1038/nbt.3026, and In vivo interrogation of gene function in the mammalian brain using CRISPR-Cas9, Swiech et al., Nature Biotechnology 33, 102-106 (2015) published online 19 Oct. 2014; doi:10.1038/nbt.3055, Cpf1 Is a Single RNA-Guided Endonuclease of a Class 2 CRISPR-Cas System, Zetsche et al., Cell 163, 1-13 (2015); Discovery and Functional Characterization of Diverse Class 2 CRISPR-Cas Systems, Shmakov et al., Mol Cell 60(3): 385-397 (2015); C2c2 is a single-component programmable RNA-guided RNA-targeting CRISPR effector, Abudayyeh et al., Science (2016) published online Jun. 2, 2016 doi: 10.1126/science.aaf5573. Each of these publications, patents, patent publications, and applications, and all documents cited therein or during their prosecution (“appln cited documents”) and all documents cited or referenced in the appln cited documents, together with any instructions, descriptions, product specifications, and product sheets for any products mentioned therein or in any document therein and incorporated by reference herein, are hereby incorporated herein by reference, and may be employed in the practice of the invention. All documents (e.g., these patents, patent publications and applications and the appln cited documents) are incorporated herein by reference to the same extent as if each individual document was specifically and individually indicated to be incorporated by reference.

[0232] In certain embodiments, the CRISPR/Cas system or complex is a class 2 CRISPR/Cas system. In certain embodiments, said CRISPR/Cas system or complex is a type II, type V, or type VI CRISPR/Cas system or complex. The CRISPR/Cas system does not require the generation of customized proteins to target specific sequences but rather a single Cas protein can be programmed by an RNA guide (gRNA) to recognize a specific nucleic acid target, in other words the Cas enzyme protein can be recruited to a specific nucleic acid target locus (which may comprise or consist of RNA and/or DNA) of interest using said short RNA guide.

[0233] In general, the CRISPR/Cas or CRISPR system is as used herein foregoing documents refers collectively to transcripts and other elements involved in the expression of or directing the activity of CRISPR-associated (“Cas”) genes, including sequences encoding a Cas gene and one or more of, a tracr (trans-activating CRISPR) sequence (e.g., tracrRNA or an active partial tracrRNA), a tracr-mate sequence (encompassing a “direct repeat” and a tracrRNA-processed partial direct repeat in the context of an endogenous CRISPR system), a guide sequence (also referred to as a “spacer” in the context of an endogenous CRISPR system), or “RNA(s)” as that term is herein used (e.g., RNA(s) to guide Cas, such as Cas9, e.g., CRISPR RNA and, where applicable, transactivating (tracr) RNA or a single guide RNA (sgRNA) (chimeric RNA)) or other sequences and transcripts from a CRISPR locus. In general, a CRISPR system is characterized by elements that promote the formation of a CRISPR complex at the site of a target sequence (also referred to as a protospacer in the context of an endogenous CRISPR system). In the context of formation of a CRISPR complex, “target sequence” refers to a sequence to which a guide sequence is designed to have complementarity, where hybridization between a target sequence and a guide sequence promotes the formation of a CRISPR complex. A target sequence may comprise any polynucleotide, such as DNA or RNA polynucleotides.

[0234] In certain embodiments, the gRNA is a chimeric guide RNA or single guide RNA (sgRNA). In certain embodiments, the gRNA comprises a guide sequence and a tracr mate sequence (or direct repeat). In certain embodiments, the gRNA comprises a guide sequence, a tracr mate sequence (or direct repeat), and a tracr sequence. In certain embodiments, the CRISPR/Cas system or complex as described herein does not comprise and/or does not rely on the presence of a tracr sequence (e.g., if the Cas protein is Cpf1).

[0235] As used herein, the term “crRNA” or “guide RNA” or “single guide RNA” or “sgRNA” or “one or more nucleic acid components” of a CRISPR/Cas locus effector protein, as applicable, comprises any polynucleotide sequence having sufficient complementarity with a target nucleic acid sequence to hybridize with the target nucleic acid sequence and direct sequence-specific binding of a nucleic acid-targeting complex to the target nucleic acid sequence. In some embodiments, the degree of complementarity, when optimally aligned using a suitable alignment algorithm, is about or more than about 50%, 60%, 75%, 80%, 85%, 90%, 95%, 97.5%, 99%, or more. Optimal alignment may be determined with the use of any suitable algorithm for aligning sequences, non-limiting example of which include the Smith-Waterman algorithm, the Needleman-Wunsch algorithm, algorithms based on the Burrows-Wheeler Transform (e.g., the Burrows Wheeler Aligner), ClustalW, Clustal X, BLAT, Novoalign (Novocraft Technologies; available at www.novocraft.com), ELAND (Illumina, San Diego, CA), SOAP (available at soap.genomics.org.cn), and Maq (available at maq.sourceforge.net). The ability of a guide sequence (within a nucleic acid-targeting guide RNA) to direct sequence-specific binding of a nucleic acid-targeting complex to a target nucleic acid sequence may be assessed by any suitable assay.

[0236] A guide sequence, and hence a nucleic acid-targeting guide RNA may be selected to target any target nucleic acid sequence. The target sequence may be DNA. The target sequence may be genomic DNA. The target sequence may be mitochondrial DNA. The target sequence may be any RNA sequence. In some embodiments, the target sequence may be a sequence within an RNA molecule selected from the group consisting of messenger RNA (mRNA), pre-mRNA, ribosomal RNA (rRNA), transfer RNA (tRNA), micro-RNA (miRNA), small interfering RNA (siRNA), small nuclear RNA (snRNA), small nucleolar RNA (snoRNA), double stranded RNA (dsRNA), non-coding RNA (ncRNA), long non-coding RNA (lncRNA), and small cytoplasmatic RNA (scRNA). In some preferred embodiments, the target sequence may be a sequence within an RNA molecule selected from the group consisting of mRNA, pre-mRNA, and rRNA. In some preferred embodiments, the target sequence may be a sequence within an RNA molecule selected from the group consisting of ncRNA, and lncRNA. In some more preferred embodiments, the target sequence may be a sequence within an mRNA molecule or a pre-mRNA molecule.

[0237] In certain embodiments, the gRNA comprises a stem loop, preferably a single stem loop. In certain embodiments, the direct repeat sequence forms a stem loop, preferably a single stem loop. In certain embodiments, the spacer length of the guide RNA is from 15 to 35 nt. In certain embodiments, the spacer length of the guide RNA is at least 15 nucleotides. In certain embodiments, the spacer length is from 15 to 17 nt, e.g., 15, 16, or 17 nt, from 17 to 20 nt, e.g., 17, 18, 19, or 20 nt, from 20 to 24 nt, e.g., 20, 21, 22, 23, or 24 nt, from 23 to 25 nt, e.g., 23, 24, or 25 nt, from 24 to 27 nt, e.g., 24, 25, 26, or 27 nt, from 27-30 nt, e.g., 27, 28, 29, or 30 nt, from 30-35 nt, e.g., 30, 31, 32, 33, 34, or 35 nt, or 35 nt or longer. In particular embodiments, the CRISPR/Cas system requires a tracrRNA. The “tracrRNA” sequence or analogous terms includes any polynucleotide sequence that has sufficient complementarity with a crRNA sequence to hybridize. In some embodiments, the degree of complementarity between the tracrRNA sequence and crRNA sequence along the length of the shorter of the two when optimally aligned is about or more than about 25%, 30%, 40%, 50%, 60%, 70%, 80%, 90%, 95%, 97.5%, 99%, or higher. In some embodiments, the tracr sequence is about or more than about 5, 6, 7, 8, 9, 10, 11, 12, 13, 14, 15, 16, 17, 18, 19, 20, 25, 30, 40, 50, or more nucleotides in length. In some embodiments, the tracr sequence and gRNA sequence are contained within a single transcript, such that hybridization between the two produces a transcript having a secondary structure, such as a hairpin. In an embodiment of the invention, the transcript or transcribed polynucleotide sequence has at least two or more hairpins. In preferred embodiments, the transcript has two, three, four or five hairpins. In a further embodiment of the invention, the transcript has at most five hairpins. In a hairpin structure the portion of the sequence 5′ of the final “N” and upstream of the loop may correspond to the tracr mate sequence, and the portion of the sequence 3′ of the loop then corresponds to the tracr sequence. In a hairpin structure the portion of the sequence 5′ of the final “N” and upstream of the loop may alternatively correspond to the tracr sequence, and the portion of the sequence 3′ of the loop corresponds to the tracr mate sequence. In alternative embodiments, the CRISPR/Cas system does not require a tracrRNA, as is known by the skilled person.

[0238] In certain embodiments, the guide RNA (capable of guiding Cas to a target locus) may comprise (1) a guide sequence capable of hybridizing to a target locus and (2) a tracr mate or direct repeat sequence (in 5′ to 3′ orientation, or alternatively in 3′ to 5′ orientation, depending on the type of Cas protein, as is known by the skilled person). In particular embodiments, the CRISPR/Cas protein is characterized in that it makes use of a guide RNA comprising a guide sequence capable of hybridizing to a target locus and a direct repeat sequence, and does not require a tracrRNA. In particular embodiments, where the CRISPR/Cas protein is characterized in that it makes use of a tracrRNA, the guide sequence, tracr mate, and tracr sequence may reside in a single RNA, i.e., an sgRNA (arranged in a 5′ to 3′ orientation or alternatively arranged in a 3′ to 5′ orientation), or the tracr RNA may be a different RNA than the RNA containing the guide and tracr mate sequence. In these embodiments, the tracr hybridizes to the tracr mate sequence and directs the CRISPR/Cas complex to the target sequence.

[0239] Typically, in the context of an endogenous nucleic acid-targeting system, formation of a nucleic acid-targeting complex (comprising a guide RNA hybridized to a target sequence and complexed with one or more nucleic acid-targeting effector proteins) results in modification (such as cleavage) of one or both DNA or RNA strands in or near (e.g., within 1, 2, 3, 4, 5, 6, 7, 8, 9, 10, 20, 50, or more base pairs from) the target sequence. As used herein the term “sequence(s) associated with a target locus of interest” refers to sequences near the vicinity of the target sequence (e.g., within 1, 2, 3, 4, 5, 6, 7, 8, 9, 10, 20, 50, or more base pairs from the target sequence, wherein the target sequence is comprised within a target locus of interest). The skilled person will be aware of specific cut sites for selected CRISPR/Cas systems, relative to the target sequence, which as is known in the art may be within the target sequence or alternatively 3′ or 5′ of the target sequence.

[0240] In some embodiments, the unmodified nucleic acid-targeting effector protein may have nucleic acid cleavage activity. In some embodiments, the nuclease as described herein may direct cleavage of one or both nucleic acid (DNA, RNA, or hybrids, which may be single or double stranded) strands at the location of or near a target sequence, such as within the target sequence and/or within the complement of the target sequence or at sequences associated with the target sequence. In some embodiments, the nucleic acid-targeting effector protein may direct cleavage of one or both DNA or RNA strands within about 1, 2, 3, 4, 5, 6, 7, 8, 9, 10, 15, 20, 25, 50, 100, 200, 500, or more base pairs from the first or last nucleotide of a target sequence. In some embodiments, the cleavage may be blunt (e.g., for Cas9, such as SaCas9 or SpCas9). In some embodiments, the cleavage may be staggered (e.g., for Cpf1), i.e., generating sticky ends. In some embodiments, the cleavage is a staggered cut with a 5′ overhang. In some embodiments, the cleavage is a staggered cut with a 5′ overhang of 1 to 5 nucleotides, preferably of 4 or 5 nucleotides. In some embodiments, the cleavage site is upstream of the PAM. In some embodiments, the cleavage site is downstream of the PAM. In some embodiments, the nucleic acid-targeting effector protein that may be mutated with respect to a corresponding wild-type enzyme such that the mutated nucleic acid-targeting effector protein lacks the ability to cleave one or both DNA or RNA strands of a target polynucleotide containing a target sequence. As a further example, two or more catalytic domains of a Cas protein (e.g., RuvC I, RuvC II, and RuvC III or the HNH domain of a Cas9 protein) may be mutated to produce a mutated Cas protein substantially lacking all DNA cleavage activity. In some embodiments, a nucleic acid-targeting effector protein may be considered to substantially lack all DNA and/or RNA cleavage activity when the cleavage activity of the mutated enzyme is about no more than 25%, 10%, 5%, 1%, 0.1%, 0.01%, or less of the nucleic acid cleavage activity of the non-mutated form of the enzyme; an example can be when the nucleic acid cleavage activity of the mutated form is nil or negligible as compared with the non-mutated form. As used herein, the term “modified” Cas generally refers to a Cas protein having one or more modifications or mutations (including point mutations, truncations, insertions, deletions, chimeras, fusion proteins, etc.) compared to the wild-type Cas protein from which it is derived. By derived is meant that the derived enzyme is largely based, in the sense of having a high degree of sequence homology with, a wildtype enzyme, but that it has been mutated (modified) in some way as known in the art or as described herein.

[0241] In certain embodiments, the target sequence should be associated with a PAM (protospacer adjacent motif) or PFS (protospacer flanking sequence or site); that is, a short sequence recognized by the CRISPR complex. The precise sequence and length requirements for the PAM differ depending on the CRISPR enzyme used, but PAMs are typically 2-5 base pair sequences adjacent the protospacer (that is, the target sequence). Examples of PAM sequences are given in the examples section below, and the skilled person will be able to identify further PAM sequences for use with a given CRISPR enzyme. Further, engineering of the PAM Interacting (PI) domain may allow programming of PAM specificity, improve target site recognition fidelity, and increase the versatility of the Cas, e.g., Cas9, genome engineering platform. Cas proteins, such as Cas9 proteins may be engineered to alter their PAM specificity, for example as described in Kleinstiver B P et al., Engineered CRISPR-Cas9 nucleases with altered PAM specificities. Nature. 2015 Jul. 23; 523(7561):481-5. doi: 10.1038/nature14592. In some embodiments, the method comprises allowing a CRISPR complex to bind to the target polynucleotide to effect cleavage of said target polynucleotide thereby modifying the target polynucleotide, wherein the CRISPR complex comprises a CRISPR enzyme complexed with a guide sequence hybridized to a target sequence within said target polynucleotide, wherein said guide sequence is linked to a tracr mate sequence which in turn hybridizes to a tracr sequence. The skilled person will understand that other Cas proteins may be modified analogously.

[0242] The Cas protein as referred to herein, such as without limitation Cas9, Cpf1 (Cas12a), C2c1 (Cas12b), C2c2 (Cas13a), C2c3, Cas13b protein, may originate from any suitable source, and hence may include different orthologues, originating from a variety of (prokaryotic) organisms, as is well documented in the art. In certain embodiments, the Cas protein is (modified) Cas9, preferably (modified) Staphylococcus aureus Cas9 (SaCas9) or (modified) Streptococcus pyogenes Cas9 (SpCas9). In certain embodiments, the Cas protein is (modified) Cpf1, preferably Acidaminococcus sp., such as Acidaminococcus sp. BV3L6 Cpf1 (AsCpf1) or Lachnospiraceae bacterium Cpf1, such as Lachnospiraceae bacterium MA2020 or Lachnospiraceae bacterium MD2006 (LbCpf1). In certain embodiments, the Cas protein is (modified) C2c2, preferably Leptotrichia wadei C2c2 (LwC2c2) or Listeria newyorkensis FSL M6-0635 C2c2 (LbFSLC2c2). In certain embodiments, the (modified) Cas protein is C2c1. In certain embodiments, the (modified) Cas protein is C2c3. In certain embodiments, the (modified) Cas protein is Cas13b.

[0243] Further, gene editing may comprise also the exchange of single nucleotides by means of base editors. A base editor as used herein refers to a protein or a fragment thereof having the capacity to mediate a targeted base modification, i.e., the conversion of a base of interest resulting in a point mutation of interest. Preferably, the at least one base editor in the context of the present invention is temporarily or permanently fused to at least one DSBI enzyme, or optionally to a component of at least one DSBI. The fusion can be covalent and/or non-covalent. Multiple publications have shown targeted base conversion, primarily cytidine (C) to thymine (T), using a CRISPR/Cas9 nickase or non-functional nuclease linked to a cytidine deaminase domain, Apolipoprotein B mRNA-editing catalytic polypeptide (APOBEC1), e.g., APOBEC derived from rat. The deamination of cytosine (C) is catalysed by cytidine deaminases and results in uracil (U), which has the base-pairing properties of thymine (T). Most known cytidine deaminases operate on RNA, and the few examples that are known to accept DNA require single-stranded (ss) DNA. Studies on the dCas9-target DNA complex reveal that at least nine nucleotides (nt) of the displaced DNA strand are unpaired upon formation of the Cas9-guide RNA-DNA ‘R-loop’ complex (Jore et al., Nat. Struct. Mol. Biol., 18, 529-536 (2011)). Indeed, in the structure of the Cas9 R-loop complex, the first 11 nt of the protospacer on the displaced DNA strand are disordered, suggesting that their movement is not highly restricted. It has also been speculated that Cas9 nickase-induced mutations at cytosines in the non-template strand might arise from their accessibility by cellular cytosine deaminase enzymes. It was reasoned that a subset of this stretch of ssDNA in the R-loop might serve as an efficient substrate for a dCas9-tethered cytidine deaminase to effect direct, programmable conversion of C to U in DNA (Komor et al., supra). Recently, Goudelli et al., ((2017). Programmable base editing of A⋅T to G⋅C in genomic DNA without DNA cleavage. Nature, 551(7681), 464.) described adenine base editors (ABEs) that mediate the conversion of A⋅T to G⋅C in genomic DNA.

[0244] In certain embodiments, the nucleic acid modification is effected by random mutagenesis. The skilled person will understand that identification and selection of suitable mutations may include appropriate selection assays, such as functional selection assays (including genotypic or phenotypic selection assays). In random mutagenesis, cells or organisms may be exposed to mutagens such as UV, X-ray, or gamma ray radiation or mutagenic chemicals (such as for instance such as ethyl methanesulfonate (EMS), ethylnitrosourea (ENU), or dimethylsulfate (DMS), and mutants with desired characteristics are then selected. Mutants can for instance be identified by TILLING (Targeting Induced Local Lesions in Genomes). The method combines mutagenesis, such as mutagenesis using a chemical mutagen such as ethyl methanesulfonate (EMS) with a sensitive DNA screening-technique that identifies single base mutations/point mutations in a target gene. The TILLING method relies on the formation of DNA heteroduplexes that are formed when multiple alleles are amplified by PCR and are then heated and slowly cooled. A “bubble” forms at the mismatch of the two DNA strands, which is then cleaved by a single stranded nuclease. The products are then separated by size, such as by HPLC. See also McCallum et al., “Targeted screening for induced mutations”; Nat Biotechnol. 2000 April; 18(4):455-7 and McCallum et al., “Targeting Induced Local Lesions IN Genomes (TILLING) for plant functional genomics”; Plant Physiol. 2000 June; 123(2):439-42, both incorporated by reference in their entirety. By means of further example, and without limitation, the methodologies described in the following publications, incorporated by reference in their entirety, may be adopted according to the present invention, such as in connection with EMS mutagenesis: Till et al., “Discovery of induced point mutations in maize genes by TILLING”; BMC Plant Biol. 2004 Jul. 28; 4:12; and Weil & Monde “Getting the point-mutations in maize” Crop Sci 2007; 47 S60-S67. The skilled person will understand that depending on the mutagen dose (irradiation of chemical) the (average) mutation density can be varied or fixed. In certain embodiments, the random mutagenesis is single nucleotide mutagenesis. In certain embodiments, the random mutagenesis is chemical mutagenesis, preferably EMS mutagenesis.

[0245] “RNA interference” or “RNAi” is a biological process in which RNA molecules inhibit gene expression or translation, by neutralizing targeted mRNA molecules. Two types of small ribonucleic acid (RNA) molecules—microRNA (miRNA) and small interfering RNA (siRNA)—are central to RNA interference. RNAs are the direct products of genes, and these small RNAs can bind to other specific messenger RNA (mRNA) molecules and either increase or decrease their activity, for example by preventing an mRNA from being translated into a protein. The RNAi pathway is found in many eukaryotes, including animals, and is initiated by the enzyme Dicer, which cleaves long double-stranded RNA (dsRNA) molecules into short double-stranded fragments of about 21 nucleotide siRNAs (small interfering RNAs). Each siRNA is unwound into two single-stranded RNAs (ssRNAs), the passenger strand and the guide strand. The passenger strand is degraded, and the guide strand is incorporated into the RNA-induced silencing complex (RISC). Mature miRNAs are structurally similar to siRNAs produced from exogenous dsRNA, but before reaching maturity, miRNAs must first undergo extensive post-transcriptional modification. A miRNA is expressed from a much longer RNA-coding gene as a primary transcript known as a pri-miRNA which is processed, in the cell nucleus, to a 70-nucleotide stem-loop structure called a pre-miRNA by the microprocessor complex. This complex consists of an RNase Ill enzyme called Drosha and a dsRNA-binding protein DGCR8. The dsRNA portion of this pre-miRNA is bound and cleaved by Dicer to produce the mature miRNA molecule that can be integrated into the RISC complex; thus, miRNA and siRNA share the same downstream cellular machinery. A short hairpin RNA or small hairpin RNA (shRNA/Hairpin Vector) is an artificial RNA molecule with a tight hairpin turn that can be used to silence target gene expression via RNA interference. The most well-studied outcome is post-transcriptional gene silencing, which occurs when the guide strand pairs with a complementary sequence in a messenger RNA molecule and induces cleavage by Argonaute 2 (Ago2), the catalytic component of the RISC. In will be understood that the RNAi molecules can be applied as such to/in the plant, or can be encoded by appropriate vectors, from which the RNAi molecule is expressed. Delivery and expression systems of RNAi molecules, such as siRNAs, shRNAs or miRNAs are well known in the art.

[0246] As used herein, the term “homozygote” refers to an individual cell or plant having the same alleles at one or more or all corresponding loci on hom(e)ologous chromosomes. When the term is used with reference to a specific locus or gene, it means at least that locus or gene has the same alleles. Accordingly, for diploid organisms, the two alleles are identical, for tetraploid organisms, the 4 alleles are identical, etc. As used herein, the term “homozygous” means a genetic condition existing when identical alleles reside at corresponding loci on homologous chromosomes. As used herein, the term “heterozygote” refers to an individual cell or plant having different alleles at one or more or all corresponding loci on hom(e)ologous chromosomes. Accordingly, for diploid organisms, the two alleles are not identical, for tetraploid organisms, the 4 alleles are not identical (i.e., at least one allele is different than the other alleles), etc. When the term is used with reference to a specific locus or gene, it means at least that locus or gene has different alleles. As used herein, the term “heterozygous” means a genetic condition existing when different alleles reside at corresponding loci on homologous chromosomes. In certain embodiments, the proteins, genes, or coding sequences as described herein are heterozygous. In certain embodiments, proteins, genes, or coding sequence alleles as described herein is/are homozygous. In certain embodiments, the proteins, genes, or coding sequence alleles as described herein are heterozygous. It will be understood that homozygosity or heterozygosity preferably relates to at least a gene, i.e., the locus comprising the gene (or coding sequence derived thereof, or protein encoded thereby). However, more specifically, homozygosity or heterozygosity may equally refer to a particular polynucleotide, QTL, locus, marker, or allele, such as a polynucleotide, QTL, locus, marker, or allele described herein. Accordingly, a particular polynucleotide, QTL, locus, marker, or allele can be considered to be homozygous, whereas for instance the remainder of the genome may comprise differences between alleles.

[0247] In certain embodiments, the polynucleotide, QTL, locus, marker, and/or allele as defined herein is homozygous. Accordingly, in diploid plants the two alleles are identical (at least with respect to the particular polynucleotide, QTL, locus, or marker), in tetraploid plants the four alleles are identical, and in hexaploid plants the six alleles are identical with respect to the polynucleotide, QTL, locus, or marker. In certain embodiments, the polynucleotide, QTL, locus, or marker as defined herein is heterozygous. Accordingly, in diploid plants the two alleles are not identical, in tetraploid plants the four alleles are not identical (for instance only one, two, or three alleles comprise the specific polynucleotide, QTL, locus, or marker), and in hexaploid plants the six alleles are not identical with respect to the polynucleotide, QTL, locus, or marker (for instance only one, two, three, four or five alleles comprise the specific polynucleotide, QTL, locus, or marker). Similar considerations apply in case of pseudopolyploid pants.

[0248] A “marker” is a means of finding or identifying a position on a genetic or physical map, or else linkages among markers and trait loci (loci affecting traits). The position that the marker detects may be known via detection of polymorphic alleles and their genetic mapping, or else by hybridization, sequence match or amplification of a sequence that has been physically mapped. A marker can be a DNA marker (detects DNA polymorphisms), a protein (detects variation at an encoded polypeptide), or a simply inherited phenotype (such as the ‘waxy’ phenotype). A DNA marker can be developed from genomic nucleotide sequence or from expressed nucleotide sequences (e.g., from a spliced RNA or a cDNA). Depending on the DNA marker technology, the marker may consist of complementary primers flanking the locus and/or complementary probes that hybridize to polymorphic alleles at the locus. The term marker locus is the locus (gene, sequence or nucleotide) that the marker detects. “Marker” or “molecular marker” or “marker locus” or “marker allele” may also be used to denote a nucleic acid or amino acid sequence that is sufficiently unique to characterize a specific locus on the genome. Any detectable polymorphic trait can be used as a marker so long as it is inherited differentially and exhibits linkage disequilibrium with a phenotypic trait of interest.

[0249] The development of markers may be based either on (quantitative trait) locus (QTL) mapping or genome wide association studies (GWAS). A locus mapping requires two parental lines (according to the present invention, one with having (increased) resistance or tolerance and one without) that differ genetically for the resistance or tolerance trait. These two types of mapping are referred to as low resolution mapping due to the fact that the identified chromosomal region (from now on called locus interval) controlling the trait can contain up to several hundreds of genes within an interval size of 5-30 cM, depending on whether the locus interval is in the telomeric or pericentromeric region. The reason for such a name is that both locus mapping as well as GWAS generally only use rather a small size of population (100 to 200 lines), thus the size of the discovered chromosomal interval within which the gene exists becomes very large. Therefore, the markers flanking the identified chromosomal region in 100 percent of cases are not diagnostic, which means the marker score generated does not necessarily match the observed phenotype in the field. For this issue to be resolved, the mapping resolution needs to be increased, and the resolution can be increased by increasing recombination events during meiosis. To accomplish this, one has to increase the population to thousands of lines plus have different generations of selfing or back crossing that take at least four years (and are very expensive and labor-intensive). In reality, the breeder must perform high resolution mapping of fine mapping in order to have a marker nearer to the gene. In the initial screening, the thousands of individuals are screened only for initial flanking markers identified through low-resolution mapping. Such a screening aims to find recombinants. Recombination events between markers and the gene will allow to narrow down the interval and come closer to the gene. The next step is designing additional markers within the targeted interval. These may range for instance from ten to twenty markers, depending on how long an interval is. Then screen the newly identified recombinants with these 10-20 markers. This will help find the closest marker with the least number of recombination events between it and the gene, keeping in mind that the marker is only close to the gene, not within it, so there is still a possibility that the marker score does not match the observed phenotype. So, as you can see the approach requires a lot of time, efforts, and money should be invested. The use of literature-based markers is another possibility. It is more convenient and time-efficient if the information of the closet marker is already published, otherwise the publication is only beneficial to determine the corresponding chromosomal interval responsible for the trait of interest.

[0250] Markers that detect genetic polymorphisms between members of a population are well-established in the art. Markers can be defined by the type of polymorphism that they detect and also the marker technology used to detect the polymorphism. Marker types include but are not limited to, e.g., detection of restriction fragment length polymorphisms (RFLP), detection of isozyme markers, randomly amplified polymorphic DNA (RAPD), amplified fragment length polymorphisms (AFLPs), detection of simple sequence repeats (SSRs), detection of amplified variable sequences of the plant genome, detection of self-sustained sequence replication, or detection of single nucleotide polymorphisms (SNPs). SNPs can be detected e.g., via DNA sequencing, PCR-based sequence specific amplification methods, detection of polynucleotide polymorphisms by allele specific hybridization (ASH), dynamic allele-specific hybridization (DASH), molecular beacons, microarray hybridization, oligonucleotide ligase assays, Flap endonucleases, 5′ endonucleases, primer extension, single strand conformation polymorphism (SSCP) or temperature gradient gel electrophoresis (TGGE). DNA sequencing, such as the pyrosequencing technology has the advantage of being able to detect a series of linked SNP alleles that constitute a haplotype. Haplotypes tend to be more informative (detect a higher level of polymorphism) than SNPs.

[0251] A “marker allele”, alternatively an “allele of a marker locus”, can refer to one of a plurality of polymorphic nucleotide sequences found at a marker locus in a population. With regard to a SNP marker, allele refers to the specific nucleotide base present at that SNP locus in that individual plant. As used herein, reference to markers or marker alleles refers to markers or marker alleles associated with, linked with, or characteristic of resistance and/or tolerance, unless explicitly referred to otherwise. Such markers or marker alleles are typically annotated as “donor” markers or marker alleles.

[0252] “Fine-mapping” refers to methods by which the position of a locus can be determined more accurately (narrowed down) and by which the size of the introgression fragment comprising the QTL is reduced. For example, Near Isogenic Lines for the locus can be made, which contain different, overlapping fragments of the introgression fragment within an otherwise uniform genetic background of the recurrent parent. Such lines can then be used to map on which fragment the locus is located and to identify a line having a shorter introgression fragment comprising the locus.

[0253] “Marker assisted selection” (of MAS) is a process by which individual plants are selected based on marker genotypes. “Marker assisted counter-selection” is a process by which marker genotypes are used to identify plants that will not be selected, allowing them to be removed from a breeding program or planting. Marker assisted selection uses the presence of molecular markers, which are genetically linked to a particular locus or to a particular chromosome region (e.g., introgression fragment, transgene, polymorphism, mutation, etc.), to select plants for the presence of the specific locus or region (introgression fragment, transgene, polymorphism, mutation, etc.). For example, a marker allele genetically linked to a locus, QTL or gene as defined herein, can be used to detect and/or select plants comprising the locus, QTL or gene. The closer the genetic linkage of the marker allele to the locus (e.g., about 10 cM, 7 cM, 6 cM, 5 cM, 4 cM, 3 cM, 2 cM, 1 cM, 0.5 cM or less), the less likely it is that the marker is dissociated from the locus through meiotic recombination. Likewise, the closer two markers are linked to each other (e.g., within 10 cM, 7 cM, 5 cM, 4 cM, 3 cM, 2 cM, 1 cM or less) the less likely it is that the two markers will be separated from one another (and the more likely they will co-segregate as a unit). A marker “within 10 cM or within 7 cM or within 5 cM, 3 cM, 2 cM, or 1 cM” of another marker refers to a marker which genetically maps to within the 10 cM or 7 cM or 5 cM, 3 cM, 2 cM, or 1 cM region flanking the marker (i.e., either side of the marker). Similarly, a marker within 10 Mb, 5 Mb, 3 Mb, 2.5 Mb, 2 Mb, 1 Mb, 0.5 Mb, 0.4 Mb, 0.3 Mb, 0.2 Mb, 0.1 Mb, 50 kb, 20 kb, 10 kb, 5 kb, 2 kb, 1 kb or less of another marker refers to a marker which is physically located within the 10 Mb, 5 Mb, 3 Mb, 2.5 Mb, 2 Mb, 1 Mb, 0.5 Mb, 0.4 Mb, 0.3 Mb, 0.2 Mb, 0.1 Mb, 50 kb, 20 kb, 10 kb, 5 kb, 2 kb, 1 kb or less, of the genomic DNA region flanking the marker (i.e., either side of the marker). “LOD-score” (logarithm (base 10) of odds) refers to a statistical test often used for linkage analysis in animal and plant populations. The LOD score compares the likelihood of obtaining the test data if the two loci (molecular marker loci and/or a phenotypic trait locus) are indeed linked, to the likelihood of observing the same data purely by chance. Positive LOD scores favour the presence of linkage and a LOD score greater than 3.0 is considered evidence for linkage. A LOD score of +3 indicates 1000 to 1 odds that the linkage being observed did not occur by chance.

[0254] A “marker haplotype” refers to a combination of alleles at a marker locus.

[0255] A “marker locus” is a specific chromosome location in the genome of a species where a specific marker can be found. A marker locus can be used to track the presence of a second linked locus, e.g., one that affects the expression of a phenotypic trait. For example, a marker locus can be used to monitor segregation of alleles at a genetically or physically linked locus.

[0256] A “marker probe” is a nucleic acid sequence or molecule that can be used to identify the presence of a marker locus, e.g., a nucleic acid probe that is complementary to a marker locus sequence, through nucleic acid hybridization. Marker probes comprising 30 or more contiguous nucleotides of the marker locus (“all or a portion” of the marker locus sequence) may be used for nucleic acid hybridization. Alternatively, in some aspects, a marker probe refers to a probe of any type that is able to distinguish (i.e., genotype) the particular allele that is present at a marker locus.

[0257] The term “molecular marker” may be used to refer to a genetic marker or an encoded product thereof (e.g., a protein) used as a point of reference when identifying a linked locus. A marker can be derived from genomic nucleotide sequences or from expressed nucleotide sequences (e.g., from a spliced RNA, a cDNA, etc.), or from an encoded polypeptide. The term also refers to nucleic acid sequences complementary to or flanking the marker sequences, such as nucleic acids used as probes or primer pairs capable of amplifying the marker sequence. A “molecular marker probe” is a nucleic acid sequence or molecule that can be used to identify the presence of a marker locus, e.g., a nucleic acid probe that is complementary to a marker locus sequence. Alternatively, in some aspects, a marker probe refers to a probe of any type that is able to distinguish (i.e., genotype) the particular allele that is present at a marker locus. Nucleic acids are “complementary” when they specifically hybridize in solution, e.g., according to Watson-Crick base pairing rules. Some of the markers described herein are also referred to as hybridization markers when located on an indel region, such as the non-collinear region described herein. This is because the insertion region is, by definition, a polymorphism vis a vis a plant without the insertion. Thus, the marker need only indicate whether the indel region is present or absent. Any suitable marker detection technology may be used to identify such a hybridization marker, e.g., SNP technology is used in the examples provided herein.

[0258] “Genetic markers” are nucleic acids that are polymorphic in a population and where the alleles of which can be detected and distinguished by one or more analytic methods, e.g., RFLP, AFLP, isozyme, SNP, SSR, and the like. The terms “molecular marker” and “genetic marker” are used interchangeably herein. The term also refers to nucleic acid sequences complementary to the genomic sequences, such as nucleic acids used as probes. Markers corresponding to genetic polymorphisms between members of a population can be detected by methods well-established in the art. These include, e.g., PCR-based sequence specific amplification methods, detection of restriction fragment length polymorphisms (RFLP), detection of isozyme markers, detection of polynucleotide polymorphisms by allele specific hybridization (ASH), detection of amplified variable sequences of the plant genome, detection of self-sustained sequence replication, detection of simple sequence repeats (SSRs), detection of single nucleotide polymorphisms (SNPs), or detection of amplified fragment length polymorphisms (AFLPs). Well established methods are also known for the detection of expressed sequence tags (ESTs) and SSR markers derived from EST sequences and randomly amplified polymorphic DNA (RAPD).

[0259] A “genetic map” is a description of genetic linkage relationships among loci on one or more chromosomes (or chromosomes) within a given species, generally depicted in a diagrammatic or tabular form. For each genetic map, distances between loci are measured by the recombination frequencies between them, and recombinations between loci can be detected using a variety of molecular genetic markers (also called molecular markers). A genetic map is a product of the mapping population, types of markers used, and the polymorphic potential of each marker between different populations. The order and genetic distances between loci can differ from one genetic map to another.

[0260] “Genetic recombination frequency” is the frequency of a crossing over event (recombination) between two genetic loci. Recombination frequency can be observed by following the segregation of markers and/or traits following meiosis.

[0261] A “polymorphism” is a variation in the DNA between two or more individuals within a population. A polymorphism typically is a variation in the DNA that is too common to be due merely to new mutation A polymorphism preferably has a frequency of at least 1% in a population. A useful polymorphism can include a single nucleotide polymorphism (SNP), a simple sequence repeat (SSR), or an insertion/deletion polymorphism, also referred to herein as an “indel”. The term “indel” refers to an insertion or deletion, wherein one line may be referred to as having an inserted nucleotide or piece of DNA relative to a second line, or the second line may be referred to as having a deleted nucleotide or piece of DNA relative to the first line.

[0262] A “single nucleotide polymorphism (SNP)” is an allelic single nucleotide—A, T, C or G—variation within a DNA sequence representing one locus of at least two individuals of the same species. For example, two sequenced DNA fragments representing the same locus from at least two individuals of the same species, AAGCCTA to AAGCTTA, contain a difference in a single nucleotide.

[0263] “Physical distance” between loci (e.g., between molecular markers and/or between phenotypic markers) on the same chromosome is the actually physical distance expressed in bases or base pairs (bp), kilo bases or kilo base pairs (kb) or megabases or mega base pairs (Mb).

[0264] “Genetic distance” between loci (e.g., between molecular markers and/or between phenotypic markers) on the same chromosome is measured by frequency of crossing-over, or recombination frequency (RF) and is indicated in centimorgans (cM). One cM corresponds to a recombination frequency of 1% and is equal to a 1% chance that a marker at one genetic locus will be separated from a marker at a second locus due to crossing over in a single generation. If no recombinants can be found, the RF is zero and the loci are either extremely close together physically or they are identical. The further apart two loci are, the higher the RF.

[0265] A “physical map” of the genome is a map showing the linear order of identifiable landmarks (including genes, markers, etc.) on chromosome DNA. However, in contrast to genetic maps, the distances between landmarks are absolute (for example, measured in base pairs or isolated and overlapping contiguous genetic fragments) and not based on genetic recombination (that can vary in different populations).

[0266] An allele “negatively” correlates with a trait when it is linked to it and when presence of the allele is an indicator that a desired trait or trait form will not occur in a plant comprising the allele. An allele “positively” correlates with a trait when it is linked to it and when presence of the allele is an indicator that the desired trait or trait form will occur in a plant comprising the allele.

[0267] A centimorgan (“cM”) is a unit of measure of recombination frequency. One cM is equal to a 1% chance that a marker at one genetic locus will be separated from a marker at a second locus due to crossing over in a single generation.

[0268] As used herein, the term “chromosomal interval” designates a contiguous linear span of genomic DNA that resides in planta on a single chromosome. The genetic elements or genes located on a single chromosomal interval are physically linked. The size of a chromosomal interval is not particularly limited. In some aspects, the genetic elements located within a single chromosomal interval are genetically linked, typically with a genetic recombination distance of, for example, less than or equal to 20 cM, or alternatively, less than or equal to 10 cM. That is, two genetic elements within a single chromosomal interval undergo recombination at a frequency of less than or equal to 20% or 10%. The term “chromosomal interval” designates any and all intervals defined by any of the markers set forth in this invention. A chromosomal interval that correlates with increased disease resistance is provided.

[0269] The term “linked” or “closely linked”, in the present application, means that recombination between two linked loci occurs with a frequency of equal to or less than about 10% (i.e., are separated on a genetic map by not more than 10 cM), or preferably less than about 5% (i.e., 5 cM), more preferably less than about 1% (i.e., 1 cM). Put another way, the closely linked loci co-segregate at least 90% (or 95% or 99%) of the time. Marker loci are especially useful with respect to the subject matter of the current disclosure when they demonstrate a significant probability of co-segregation (linkage) with a desired trait (e.g., resistance to grey leaf spot). Closely linked loci such as a marker locus and a second locus can display an inter-locus recombination frequency of 10% or less, preferably about 9% or less, still more preferably about 8% or less, yet more preferably about 7% or less, still more preferably about 6% or less, yet more preferably about 5% or less, still more preferably about 4% or less, yet more preferably about 3% or less, and still more preferably about 2% or less. In highly preferred embodiments, the relevant loci display a recombination a frequency of about 1% or less, e.g., about 0.75% or less, more preferably about 0.5% or less, or yet more preferably about 0.25% or less. Two loci that are localized to the same chromosome, and at such a distance that recombination between the two loci occurs at a frequency of less than 10% (e.g., about 9%, 8%, 7%, 6%, 5%, 4%, 3%, 2%, 1%, 0.75%, 0.5%, 0.25%, or less) are also said to be “proximal to” each other. In some cases, two different markers can have the same genetic map coordinates. In that case, the two markers are in such close proximity to each other that recombination occurs between them with such low frequency that it is undetectable.

[0270] “Linkage” refers to the tendency for alleles to segregate together more often than expected by chance if their transmission was independent. Typically, linkage refers to alleles on the same chromosome. Genetic recombination occurs with an assumed random frequency over the entire genome. Genetic maps are constructed by measuring the frequency of recombination between pairs of traits or markers. The closer the traits or markers are to each other on the chromosome, the lower the frequency of recombination, and the greater the degree of linkage. Traits or markers are considered herein to be linked if they generally co-segregate. A 1/100 probability of recombination per generation is defined as a genetic map distance of 1.0 centiMorgan (1.0 cM).

[0271] The term “linkage disequilibrium” refers to a non-random segregation of genetic loci or traits (or both). In either case, linkage disequilibrium implies that the relevant loci are within sufficient physical proximity along a length of a chromosome so that they segregate together with greater than random (i.e., non-random) frequency. Markers that show linkage disequilibrium are considered linked. Linked loci co-segregate more than 50% of the time, e.g., from about 51% to about 100% of the time. In other words, two markers that co-segregate have a recombination frequency of less than 50% (and by definition, are separated by less than 50 cM on the same linkage group.) As used herein, linkage can be between two markers, or alternatively between a marker and a locus affecting a phenotype. A marker locus can be “associated with” (linked to) a trait. The degree of linkage of a marker locus and a locus affecting a phenotypic trait is measured, e.g., as a statistical probability of co-segregation of that molecular marker with the phenotype (e.g., an F statistic or LOD score).

[0272] The “probability value” or “p-value” is the statistical likelihood that the particular combination of a phenotype and the presence or absence of a particular marker allele is random. Thus, the lower the probability score, the greater the likelihood that a phenotype and a particular marker will co-segregate. In this context the probability score is considered “significant” or “nonsignificant”. In some embodiments, a probability score of 0.05 (p=0.05, or a 5% probability) of random assortment is considered a significant indication of co-segregation.

[0273] The genetic elements or genes located on a single chromosome segment are physically linked. In some embodiments, the two loci are located in close proximity such that recombination between homologous chromosome pairs does not occur between the two loci during meiosis with high frequency, e.g., such that linked loci co-segregate at least about 90% of the time, e.g., 91%, 92%, 93%, 94%, 95%, 96%, 97%, 98%, 99%, 99.5%, 99.75%, or more of the time. The genetic elements located within a chromosomal segment are also “genetically linked”, typically within a genetic recombination distance of less than or equal to 50 cM, e.g., about 49, 48, 47, 46, 45, 44, 43, 42, 41, 40, 39, 38, 37, 36, 35, 34, 33, 32, 31, 30, 29, 28, 27, 26, 25, 24, 23, 22, 21, 20, 19, 18, 17, 16, 15, 14, 13, 12, 11, 10, 9, 8, 7, 6, 5, 4, 3, 2, 1, 0.75, 0.5, 0.25 cM or less. That is, two genetic elements within a single chromosomal segment undergo recombination during meiosis with each other at a frequency of less than or equal to about 50%, e.g., about 49%, 48%, 47%, 46%, 45%, 44%, 43%, 42%, 41%, 40%, 39%, 38%, 37%, 36%, 35%, 34%, 33%, 32%, 31%, 30%, 29%, 28%, 27%, 26%, 25%, 24%, 23%, 22%, 21%, 20%, 19%, 18%, 17%, 16%, 15%, 14%, 13%, 12%, 11%, 10%, 9%, 8%, 7%, 6%, 5%, 4%, 3%, 2%, 1%, 0.75%, 0.5%, 0.25% or less. “Closely linked” markers display a cross over frequency with a given marker of about 10% or less, e.g., 9%, 8%, 7%, 6%, 5%, 4%, 3%, 2%, 1%, 0.75%, 0.5%, 0.25% or less (the given marker locus is within about 10 cM of a closely linked marker locus, e.g., 9, 8, 7, 6, 5, 4, 3, 2, 1, 0.75, 0.5, 0.25 cM or less of a closely linked marker locus). Put another way, closely linked marker loci co-segregate at least about 90% the time, e.g., 91%, 92%, 93%, 94%, 95%, 96%, 97%, 98%, 99%, 99.5%, 99.75%, or more of the time.

[0274] As used herein, the term “sequence identity” refers to the degree of identity between any given nucleic acid sequence and a target nucleic acid sequence. Percent sequence identity is calculated by determining the number of matched positions in aligned nucleic acid sequences, dividing the number of matched positions by the total number of aligned nucleotides, and multiplying by 100. A matched position refers to a position in which identical nucleotides occur at the same position in aligned nucleic acid sequences. Percent sequence identity also can be determined for any amino acid sequence. To determine percent sequence identity, a target nucleic acid or amino acid sequence is compared to the identified nucleic acid or amino acid sequence using the BLAST 2 Sequences (Bl2seq) program from the stand-alone version of BLASTZ containing BLASTN and BLASTP. This stand-alone version of BLASTZ can be obtained from Fish & Richardson's web site (World Wide Web at fr.com/blast) or the U.S. government's National Center for Biotechnology Information web site (World Wide Web at ncbi.nlm.nih.gov). Instructions explaining how to use the B12seq program can be found in the readme file accompanying BLASTZ. B12seq performs a comparison between two sequences using either the BLASTN or BLASTP algorithm. Preferably, BLAST sequence alignments are performed according to the standard (i.e., default) settings (i.e., at the filing date of the present application).

[0275] BLASTN is used to compare nucleic acid sequences, while BLASTP is used to compare amino acid sequences. To compare two nucleic acid sequences, the options are set as follows: -i is set to a file containing the first nucleic acid sequence to be compared (e.g., C:\seq I .txt); -j is set to a file containing the second nucleic acid sequence to be compared (e.g., C:\seq2.txt); -p is set to blastn; -o is set to any desired file name (e.g., C:\output.txt); -q is set to −1; -r is set to 2; and all other options are left at their default setting. The following command will generate an output file containing a comparison between two sequences: C:\Bl2seq -i c:\seql .txt -j c:\seq2.txt -p blastn -o c:\output.txt -q-1 -r 2. If the target sequence shares homology with any portion of the identified sequence, then the designated output file will present those regions of homology as aligned sequences. If the target sequence does not share homology with any portion of the identified sequence, then the designated output file will not present aligned sequences. Once aligned, a length is determined by counting the number of consecutive nucleotides from the target sequence presented in alignment with the sequence from the identified sequence starting with any matched position and ending with any other matched position. A matched position is any position where an identical nucleotide is presented in both the target and identified sequences. Gaps presented in the target sequence are not counted since gaps are not nucleotides. Likewise, gaps presented in the identified sequence are not counted since target sequence nucleotides are counted, not nucleotides from the identified sequence. The percent identity over a particular length is determined by counting the number of matched positions over that length and dividing that number by the length followed by multiplying the resulting value by 100. For example, if (i) a 500-base nucleic acid target sequence is compared to a subject nucleic acid sequence, (ii) the B12seq program presents 200 bases from the target sequence aligned with a region of the subject sequence where the first and last bases of that 200-base region are matches, and (iii) the number of matches over those 200 aligned bases is 180, then the 500-base nucleic acid target sequence contains a length of 200 and a sequence identity over that length of 90% (i.e., 180/200×100=90). It will be appreciated that different regions within a single nucleic acid target sequence that aligns with an identified sequence can each have their own percent identity. It is noted that the percent identity value is rounded to the nearest tenth. For example, 78.11, 78.12, 78.13, and 78.14 are rounded down to 78.1, while 78.15, 78.16, 78.17, 78.18, and 78.19 are rounded up to 78.2. It also is noted that the length value will always be an integer.

[0276] The term “sequence” when used herein relates to nucleotide sequence(s), polynucleotide(s), nucleic acid sequence(s), nucleic acid(s), nucleic acid molecule, peptides, polypeptides and proteins, depending on the context in which the term “sequence” is used. The terms “polynucleic acid”, “nucleotide sequence(s)”, “polynucleotide(s)”, “nucleic acid sequence(s)”, “nucleic acid(s)”, “nucleic acid molecule” are used interchangeably herein and refer to nucleotides, either ribonucleotides or deoxyribonucleotides or a combination of both, in a polymeric unbranched form of any length. Nucleic acid sequences include DNA, cDNA, genomic DNA, RNA, synthetic forms and mixed polymers, both sense and antisense strands, or may contain non-natural or derivatized nucleotide bases, as will be readily appreciated by those skilled in the art. Nucleotide designations as used herein are according to the table below.

| | |
|---|---|
| A | Adenine |
| C | Cytosine |
| G | Guanine |
| T (or U) | Thymine (or Uracil) |
| R | A or G |
| Y | C or T |
| S | G or C |
| W | A or T |
| K | G or T |
| M | A or C |
| B | C or G or T |
| D | A or G or T |
| H | A or C or T |
| V | A or C or G |
| N | any base |

[0277] An “isolated nucleic acid sequence”, “isolated polynucleic acid” or “isolated DNA” refers to a nucleic acid sequence which is no longer in the natural environment from which it was isolated, e.g., the nucleic acid sequence in a bacterial host cell or in the plant nuclear or plastid genome. When referring to a “sequence” herein, it is understood that the molecule having such a sequence is referred to, e.g., the nucleic acid molecule. A “host cell” or a “recombinant host cell” or “transformed cell” are terms referring to a new individual cell (or organism) arising as a result of at least one nucleic acid molecule, having been introduced into said cell. The host cell is preferably a plant cell or a bacterial cell. The host cell may contain the nucleic acid as an extra-chromosomally (episomal) replicating molecule, or comprises the nucleic acid integrated in the nuclear or plastid genome of the host cell, or as introduced chromosome, e.g., minichromosome.

[0278] When reference is made to a nucleic acid sequence (e.g., DNA or genomic DNA) having “substantial sequence identity to” a reference sequence or having a sequence identity of at least 80%>, e.g., at least 85%, 90%, 95%, 98%> or 99%> nucleic acid sequence identity to a reference sequence, in one embodiment said nucleotide sequence is considered substantially identical to the given nucleotide sequence and can be identified using hybridisation conditions. In another embodiment, the nucleic acid sequence comprises one or more mutations compared to the given nucleotide sequence but still can be identified using stringent hybridisation conditions. “Stringent hybridisation conditions” can be used to identify nucleotide sequences, which are substantially identical to a given nucleotide sequence. Stringent conditions are sequence dependent and will be different in different circumstances. Generally, stringent conditions are selected to be about 5° C. lower than the thermal melting point (Tm) for the specific sequences at a defined ionic strength and pH. The Tm is the temperature (under defined ionic strength and pH) at which 50% of the target sequence hybridises to a perfectly matched probe. Typically, stringent conditions will be chosen in which the salt concentration is about 0.02 molar at pH 7 and the temperature is at least 60° C. Lowering the salt concentration and/or increasing the temperature increases stringency. Stringent conditions for RNA-DNA hybridizations (Northern blots using a probe of e.g., 100 nt) are for example those which include at least one wash in 0.2×SSC at 63° C. for 20 min, or equivalent conditions. Stringent conditions for DNA-DNA hybridisation (Southern blots using a probe of e.g., 100 nt) are for example those which include at least one wash (usually 2) in 0.2×SSC at a temperature of at least 50° C., usually about 55° C., for 20 min, or equivalent conditions. See also Sambrook et al. (1989) and Sambrook and Russell (2001). Examples of high stringent hybridization conditions are conditions under which primarily only those nucleic acid molecules that have at least 90% or at least 95% sequence identity undergo hybridization. Such high stringent hybridization conditions are, for example: 4×SSC at 65° C. and subsequent multiple washes in 0.1×SSC at 65° C. for approximately 1 hour. The term “high stringent hybridization conditions” as used herein may also mean: hybridization at 68° C. in 0.25 M sodium phosphate, pH 7.2, 7% SDS, 1 mM EDTA and 1% BSA for 16 hours and subsequently washing twice with 2×SSC and 0.1% SDS at 68° C. Preferably, hybridization takes place under stringent conditions. Less stringent hybridization conditions are, for example: hybridizing in 4×SSC at 37° C. and subsequent multiple washing in 1×SSC at room temperature.

[0279] It will be understood that “specifically hybridizing” means that the polynucleic acid hybridises with the (molecular) marker allele (such as under stringent hybridisation conditions, as defined herein elsewhere), but does not (substantially) hybridise with a polynucleic acid not comprising the marker allele or is (substantially) incapable of being used as a PCR primer. By means of example, in a suitable readout, the hybridization signal with the marker allele or PCR amplification of the marker allele is at least 5 times, preferably at least 10 times stronger or more than the hybridisation signal with a non-marker allele, or any other sequence.

[0280] “Fragment” is intended to mean a portion of a nucleotide sequence. Fragments can be used as hybridization probes or PCR primers using methods disclosed herein.

[0281] When used herein, the term “polypeptide” or “protein” (both terms are used interchangeably herein) means a peptide, a protein, or a polypeptide which encompasses amino acid chains of a given length, wherein the amino acid residues are linked by covalent peptide bonds. However, peptidomimetics of such proteins/polypeptides wherein amino acid(s) and/or peptide bond(s) have been replaced by functional analogs are also encompassed by the invention as well as other than the 20 gene-encoded amino acids, such as selenocysteine. Peptides, oligopeptides and proteins may be termed polypeptides. The term polypeptide also refers to, and does not exclude, modifications of the polypeptide, e.g., glycosylation, acetylation, phosphorylation and the like. Such modifications are well described in basic texts and in more detailed monographs, as well as in the research literature.

[0282] Amino acid substitutions encompass amino acid alterations in which an amino acid is replaced with a different naturally-occurring amino acid residue. Such substitutions may be classified as “conservative<1>, in which an amino acid residue contained in the wild-type protein is replaced with another naturally-occurring amino acid of similar character, for example Gly<→Ala, Val<→Ile<→Leu, Asp<→Glu, Lys<→Arg, Asn<→Gln or Phe<→Trp<→Tyr. Substitutions encompassed by the present invention may also be “non-conservative”, in which an amino acid residue which is present in the wild-type protein is substituted with an amino acid with different properties, such as a naturally-occurring amino acid from a different group (e.g., substituting a charged or hydrophobic amino acid with alanine. “Similar amino acids”, as used herein, refers to amino acids that have similar amino acid side chains, i.e., amino acids that have polar, non-polar or practically neutral side chains. “Non-similar amino acids”, as used herein, refers to amino acids that have different amino acid side chains, for example an amino acid with a polar side chain is non-similar to an amino acid with a non-polar side chain. Polar side chains usually tend to be present on the surface of a protein where they can interact with the aqueous environment found in cells (“hydrophilic” amino acids). On the other hand, “non-polar” amino acids tend to reside within the center of the protein where they can interact with similar non-polar neighbours (“hydrophobic” amino acids”). Examples of amino acids that have polar side chains are arginine, asparagine, aspartate, cysteine, glutamine, glutamate, histidine, lysine, serine, and threonine (all hydrophilic, except for cysteine which is hydrophobic). Examples of amino acids that have non-polar side chains are alanine, glycine, isoleucine, leucine, methionine, phenylalanine, proline, and tryptophan (all hydrophobic, except for glycine which is neutral).

[0283] The term “gene” when used herein refers to a polymeric form of nucleotides of any length, either ribonucleotides or desoxyribonucleotides. The term includes double- and single-stranded DNA and RNA. It also includes known types of modifications, for example, methylation, “caps”, substitutions of one or more of the naturally occurring nucleotides with an analog. Preferably, a gene comprises a coding sequence encoding the herein defined polypeptide. A “coding sequence” is a nucleotide sequence which is transcribed into mRNA and/or translated into a polypeptide when placed or being under the control of appropriate regulatory sequences. The boundaries of the coding sequence are determined by a translation start codon at the 5-terminus and a translation stop codon at the 3′-terminus. A coding sequence can include, but is not limited to mRNA, cDNA, recombinant nucleic acid sequences or genomic DNA, while introns may be present as well under certain circumstances.

[0284] “Genome” refers to the total DNA, or the entire set of genes, carried by a chromosome or chromosome set.

[0285] The term “genotype” is the genetic constitution of an individual (or group of individuals) at one or more genetic loci, as contrasted with the observable trait (the phenotype). Genotype is defined by the allele(s) of one or more known loci that the individual has inherited from its parents. The term genotype can be used to refer to an individual's genetic constitution at a single locus, at multiple led, or, more generally, the term genotype can be used to refer to an individual's genetic make-up for all the genes in its genome.

[0286] A “haplotype” is the genotype of an individual at a plurality of genetic loci, i.e., a combination of alleles. Typically, the genetic loci described by a haplotype are physically and genetically linked, i.e., on the same chromosome segment. The term “haplotype” can further refer to sequence, polymorphisms at a particular locus, such as a single marker locus, or sequence polymorphisms at multiple loci along a chromosomal segment in a given genome. The former can also be referred to as “marker haplotypes” or “marker alleles”, while the latter can be referred to as “long-range haplotypes”.

[0287] The terms “phenotype”, or “phenotypic trait” or “trait” refers to one or more traits of of a plant, plant part or plant cell. The phenotype can be observable to the naked eye, or by any other means of evaluation known in the art, e.g., pathogen inoculation tests, microscopy, biochemical analysis, or an electromechanical assay. In some cases, a phenotype is directly controlled by a single gene or genetic locus, i.e., a “single gene trait”. In other cases, a phenotype is the result of several genes.

[0288] “Germplasm” refers to genetic material of or from an individual (e.g., a plant), a group of individuals (e.g., a plant line, variety, or family), or a clone derived from a line, variety, species, or culture. The germplasm can be part of an organism or cell or can be separate from the organism or cell. In general, germplasm provides genetic material with a specific molecular makeup that provides a physical foundation for some, or all of the hereditary qualities of an organism or cell culture. As used herein, germplasm includes cells, seed or tissues from which new plants may be grown, or plant parts, such as leafs, stems, pollen, or cells that can be cultured into a whole plant.

[0289] As used herein, the term “endogenous” refers to a gene or allele which is present in its natural genomic location. The term “endogenous” can be used interchangeably with “native” or “wild-type”. This does not however exclude the presence of one or more nucleic acid differences with the wild-type allele. In particular embodiments, the difference with a wild-type allele can be limited to less than 9 preferably less than 6, more particularly less than 3 nucleotide differences, such as 0 nucleotides difference. More particularly, the difference with the wildtype sequence can be in only one nucleotide. Preferably, the endogenous allele encodes a modified protein having less than 9, preferably less than 6, more particularly less than 3 and even more preferably only one or no amino acid difference with the wild-type protein.

[0290] A used herein, the term “exogenous polynucleotide” refers to a polynucleotide, such as a gene (or cDNA) or allele which is or has been recombinantly introduced in a cell (or plant). The exogenous polynucleotide may be episomal or genomically integrated. Integration may be random or site-directed. Integration may include replacement of a corresponding endogenous polynucleotide. It will be understood that an exogenous polynucleotide is not naturally present in the cell or plant.

[0291] The term “hybrid”, “hybrid plant”, or hybrid seed” as used in the context of the present invention has its ordinary meaning known in the art. By means of further guidance, and without limitation in the context of the present invention this term refers to the offspring of two (genetically distinct or different) parent plants, which may be different plant lines, cultivars, or varieties. It will be understood that according to the present invention, the parents of a hybrid plant preferably are from the same genus, preferably the same species. Preferably, the parents of a hybrid each are stable populations, having a high degree of homozygosity. The parents typically differ from each other in one or more traits or (agronomic, physiologic, or quality) characteristics. The hybrid therefore typically is heterozygous for such trait or (agronomic, physiologic, or quality) characteristic. According to the present invention, hybrids preferably are the F1 hybrids, i.e., the first generation of offspring resulting from the two parents (e.g., the two parental lines, cultivars, or varieties). The seed produced by crossing two parents is therefore the F1 hybrid seed.

[0292] Polynucleotides, QTLs, loci, markers, SNPs or alleles can be introduced by any means known in the art, for instance as described herein elsewhere, including CRISPR/Cas, ZFN, TALEN, meganucleases, RNAi, TILLING, etc.).

[0293] In certain embodiments, the mutation according to the invention as described herein is introduced by mutagenesis. In certain embodiments, the mutation according to the invention as described herein is introduced by random mutagenesis, preferably TILLING. In certain embodiments, the mutation according to the invention as described herein is introduced by TILLING. In certain embodiments, the mutation according to the invention as described herein is introduced by non-random mutagenesis. In certain embodiments, the mutation according to the invention as described herein is introduced by site-directed mutagenesis. As used herein, site-directed mutagenesis refers to sequence-specific (or sequence-dependent) or target-specific (or target-dependent) mutagenesis, as described herein elsewhere. In certain embodiments, the mutation according to the invention as described herein is introduced by gene-editing. In certain embodiments, the mutation according to the invention as described herein is introduced by genome-editing. In certain embodiments, the mutation according to the invention as described herein is introduced by designer nucleases. In certain embodiments, the mutation according to the invention as described herein is introduced by CRISPR/Cas, zinc finger nucleases, TALEN, or meganucleases, as described herein elsewhere. In certain embodiments, the polynucleotide, QTL, locus, marker, or allele as described herein according to the invention is introduced by CRISPR/Cas.

[0294] In certain embodiments, the plants or plant parts according to the invention as described herein, or generated, produced, obtained, identified, and/or selected according to the invention as described herein, are transgenic plants or plant parts.

[0295] In certain embodiments, the polynucleotide, QTL, locus, marker, or allele as described herein according to the invention as described herein is knocked-in.

[0296] In certain embodiments, the plants or plant parts according to the invention as described herein, or generated, produced, obtained, identified, and/or selected according to the invention as described herein are from the H. aegiceras, H. arizonicum, H. bogdanii, H. brachyantherum, H. brachyatherum, H. brevisubulatum, H. bulbosum, H. californicum, H. capense H. chilense, H. comosum, H. cordobense, H. depressum, H. distichon, H. erectifolium, H. euclaston, H. flexuosum, H. fuegianum, H. guatemalense, H. halophilum, H. intercedens, H. jubatum, H.×lagunculciforme, H. lechleri, H. marinum, H. murinum, H. muticum, H. parodii, H. patagonicum, H.×pavisii, H. procerum, H. pubiflorum, H. pusillum, H. roshevitzii, H. secalinum, H. spontaneum, H. stenostachys, H. tetraploidum, H. vulgare; or any subspecies or hybrid thereof, including all ploidy levels, such as diploid. Preferably, the Hordeum species is Hordeum vulgare.

[0297] In certain embodiments, the plants or plant parts according to the invention as described herein, or generated, produced, obtained, identified, and/or selected according to the invention as described herein are hybrids between different species from the genus Hordeum. In certain embodiments, the plants or plant parts according to the invention as described herein, or generated, produced, obtained, identified, and/or selected according to the invention as described herein are hybrids between different species selected from H. vulgare, H. aegiceras, H. arizonicum, H. bogdanii, H. brachyantherum, H. brachyatherum, H. brevisubulatum, H. bulbosum, H. californicum, H. capense H. chilense, H. comosum, H. cordobense, H. depressum, H. distichon, H. erectifolium, H. euclaston, H. flexuosum, H. fuegianum, H. guatemalense, H. halophilum, H. intercedens, H. jubatum, H.×lagunculciforme, H. lechleri, H. marinum, H. murinum, H. muticum, H. parodii, H. patagonicum, H.×pavisii, H. procerum, H. pubiflorum, H. pusillum, H. roshevitzii, H. secalinum, H. spontaneum, H. stenostachys, H. tetraploidum.

[0298] In certain embodiments, the plant or plant part according to the invention as described herein, or generated, produced, obtained, identified, and/or selected according to the invention as described herein, is a crop plant or crop plant part.

[0299] As a reference plant or plant part, an isogenic line may be used, i.e., a plant otherwise identical apart from the (homozygous) resistance polynucleotide, QTL, locus, gene(s), or marker(s) as referred to herein elsewhere.

[0300] In certain embodiments, the plants or plant parts according to the invention as described herein, or generated, produced, obtained, identified, and/or selected according to the invention as described herein can be used in hybrid breeding or for generating hybrid plants or plant part, such as hybrid seeds. Accordingly, in an aspect, the invention relates to the use of the plants or plant parts according to the invention as described herein, or generated, produced, obtained, identified, and/or selected according to the invention as described herein in hybrid breeding, or for generating hybrid plants or plant parts, such as hybrid seeds.

[0301] In an aspect, the invention relates to a method for identifying and/or selecting a barley plant or plant part, such as a plant or plant part having (improved or increased) resistance (or tolerance) to Barley Yellow Dwarf Virus (BYDV) and/or insects, comprising screening for the presence or absence of one or more molecular marker co-segregating with a resistance locus (or QTL) comprising a resistance gene located on chromosome 3 in a region comprising
[0302] a) the nucleotide sequence having SEQ ID NO: 1,
[0303] b) a nucleotide sequence hybridizing with the nucleotide sequence of a) or a complement thereof or a reverse complement thereof under stringent conditions,
[0304] c) a nucleotide sequence having an identity of at least 90%, such as at least 95%, to the nucleotide sequence of a).

[0305] In certain embodiments, the markers are located in a region
[0306] i. between position 573789473 of reference genome MOREX v3 or a position corresponding to position 573789473 of reference genome MOREX v3, detectable by molecular marker ge51829s01 and (the 5′ end of) the resistance gene (such as HORVU.MOREX.r2.3HG0265710, HORVU.MOREX.r2.3HG0265660, HORVU.MOREX.r2.3HG0265670, HORVU.MOREX.r2.3HG0265690, or HORVU.MOREX.r2.3HG0265720),
[0307] ii. between position 577673982 of reference genome MOREX v3 or a position corresponding to position 577673982 of reference genome MOREX v3, detectable by molecular marker ge51835s01 and the (the 5′ end of) resistance gene (such as HORVU.MOREX.r2.3HG0265710, HORVU.MOREX.r2.3HG0265660, HORVU.MOREX.r2.3HG0265670, HORVU.MOREX.r2.3HG0265690, or HORVU.MOREX.r2.3HG0265720),
[0308] iii. between position 591505046 of reference genome MOREX v3 or a position corresponding to position 591505046 of reference genome MOREX v3, detectable by molecular marker ge45688s01 and the (the 5′ end of) resistance gene (such as HORVU.MOREX.r2.3HG0265710, HORVU.MOREX.r2.3HG0265660, HORVU.MOREX.r2.3HG0265670, HORVU.MOREX.r2.3HG0265690, or HORVU.MOREX.r2.3HG0265720),
[0309] iv. between position 592578134 of reference genome MOREX v3 or a position corresponding to position 592578134 of reference genome MOREX v3, detectable by molecular marker ge45691s01 and the (the 5′ end of) resistance gene (such as HORVU.MOREX.r2.3HG0265710, HORVU.MOREX.r2.3HG0265660, HORVU.MOREX.r2.3HG0265670, HORVU.MOREX.r2.3HG0265690, or HORVU.MOREX.r2.3HG0265720),
[0310] v. between position 592685940 of reference genome MOREX v3 or a position corresponding to position 592685940 of reference genome MOREX v3, detectable by molecular marker ge45717s01 and the (the 5′ end of) resistance gene (such as HORVU.MOREX.r2.3HG0265710, HORVU.MOREX.r2.3HG0265660, HORVU.MOREX.r2.3HG0265670, HORVU.MOREX.r2.3HG0265690, or HORVU.MOREX.r2.3HG0265720),
[0311] vi. between the (the 5′ end of) resistance gene (such as HORVU.MOREX.r2.3HG0265710, HORVU.MOREX.r2.3HG0265660, HORVU.MOREX.r2.3HG0265670, HORVU.MOREX.r2.3HG0265690, or HORVU.MOREX.r2.3HG0265720) and position 592752433 of reference genome MOREX v3 or a position corresponding to position 592752433 of reference genome MOREX v3, detectable by molecular marker ge45718s01, or
[0312] vii. between the (the 5′ end of) resistance gene (such as HORVU.MOREX.r2.3HG0265710, HORVU.MOREX.r2.3HG0265660, HORVU.MOREX.r2.3HG0265670, HORVU.MOREX.r2.3HG0265690, or HORVU.MOREX.r2.3HG0265720) and position 592849403 of reference genome MOREX v3 or a position corresponding to position 592849403 of reference genome MOREX v3, detectable by molecular marker ge45719s01.

[0313] In certain embodiments, the markers are located in a region between position 573789473 of reference genome MOREX v3 or a position corresponding to position 573789473 of reference genome MOREX v3, detectable by molecular marker ge51829s01 and (the 5′ end of) the resistance gene (such as HORVU.MOREX.r2.3HG0265710, HORVU.MOREX.r2.3HG0265660, HORVU.MOREX.r2.3HG0265670, HORVU.MOREX.r2.3HG0265690, or HORVU.MOREX.r2.3HG0265720). In certain embodiments, the markers are located in a region between position 577673982 of reference genome MOREX v3 or a position corresponding to position 577673982 of reference genome MOREX v3, detectable by molecular marker ge51835s01 and the (the 5′ end of) resistance gene (such as HORVU.MOREX.r2.3HG0265710, HORVU.MOREX.r2.3HG0265660, HORVU.MOREX.r2.3HG0265670, HORVU.MOREX.r2.3HG0265690, or HORVU.MOREX.r2.3HG0265720). In certain embodiments, the markers are located in a region between position 591505046 of reference genome MOREX v3 or a position corresponding to position 591505046 of reference genome MOREX v3, detectable by molecular marker ge45688s01 and the (the 5′ end of) resistance gene (such as HORVU.MOREX.r2.3HG0265710, HORVU.MOREX.r2.3HG0265660, HORVU.MOREX.r2.3HG0265670, HORVU.MOREX.r2.3HG0265690, or HORVU.MOREX.r2.3HG0265720). In certain embodiments, the markers are located in a region between position 592578134 of reference genome MOREX v3 or a position corresponding to position 592578134 of reference genome MOREX v3, detectable by molecular marker ge45691s01 and the (the 5′ end of) resistance gene (such as HORVU.MOREX.r2.3HG0265710, HORVU.MOREX.r2.3HG0265660, HORVU.MOREX.r2.3HG0265670, HORVU.MOREX.r2.3HG0265690, or HORVU.MOREX.r2.3HG0265720). In certain embodiments, the markers are located in a region between position 592685940 of reference genome MOREX v3 or a position corresponding to position 592685940 of reference genome MOREX v3, detectable by molecular marker ge45717s01 and the (the 5′ end of) resistance gene (such as HORVU.MOREX.r2.3HG0265710, HORVU.MOREX.r2.3HG0265660, HORVU.MOREX.r2.3HG0265670, HORVU.MOREX.r2.3HG0265690, or HORVU.MOREX.r2.3HG0265720). In certain embodiments, the markers are located in a region between the (the 5′ end of) resistance gene (such as HORVU.MOREX.r2.3HG0265710, HORVU.MOREX.r2.3HG0265660, HORVU.MOREX.r2.3HG0265670, HORVU.MOREX.r2.3HG0265690, or HORVU.MOREX.r2.3HG0265720) and position 592752433 of reference genome MOREX v3 or a position corresponding to position 592752433 of reference genome MOREX v3, detectable by molecular marker ge45718s01. In certain embodiments, the markers are located in a region between the (the 5′ end of) resistance gene (such as HORVU.MOREX.r2.3HG0265710, HORVU.MOREX.r2.3HG0265660, HORVU.MOREX.r2.3HG0265670, HORVU.MOREX.r2.3HG0265690, or HORVU.MOREX.r2.3HG0265720) and position 592849403 of reference genome MOREX v3 or a position corresponding to position 592849403 of reference genome MOREX v3, detectable by molecular marker ge45719s01.

[0314] In certain embodiments, the markers are selected from ge51829s01, ge51835s01, ge45688s01, ge45691s01, ge45717s01, ge45718s01, and ge45719s01. In certain embodiments, the marker is ge51829s01. In certain embodiments, the marker is ge51835s01. In certain embodiments, the marker is ge45688s01. In certain embodiments, the marker is ge45691s01. In certain embodiments, the marker is ge45717s01. In certain embodiments, the marker is ge45718s01. In certain embodiments, the marker is ge45719s01.

[0315] In certain embodiments, the method comprises screening for the presence of a polynucleotide (in particular comprising a resistance gene or a resistance locus comprising a resistance gene on chromosome 3) comprising one or more molecular marker (allele) selected from ge51829s01, ge51835s01, ge45688s01, ge45691s01, ge45717s01, ge45718s01, and ge45719s01 (in the genome of the plant or plant part).

[0316] In certain embodiments, the method comprises screening for the presence of a polynucleotide (in particular comprising a resistance gene or a resistance locus comprising a resistance gene on chromosome 3) comprising one or more molecular marker (allele) selected from ge45717s01 and ge45718s01 (in the genome of the plant or plant part).

[0317] In certain embodiments, the method comprises screening for the presence of a polynucleotide (in particular comprising a resistance gene or a resistance locus comprising a resistance gene on chromosome 3) comprising molecular marker (allele) ge51829s01 (in the genome of the plant or plant part). In certain embodiments, the method comprises screening for the presence of a polynucleotide (in particular comprising a resistance gene or a resistance locus comprising a resistance gene on chromosome 3) comprising molecular marker (allele) ge51835s01 (in the genome of the plant or plant part). In certain embodiments, the method comprises screening for the presence of a polynucleotide (in particular comprising a resistance gene or a resistance locus comprising a resistance gene on chromosome 3) comprising molecular marker (allele) ge45688s01 (in the genome of the plant or plant part). In certain embodiments, the method comprises screening for the presence of a polynucleotide (in particular comprising a resistance gene or a resistance locus comprising a resistance gene on chromosome 3) comprising molecular marker (allele) ge45691s01 (in the genome of the plant or plant part). In certain embodiments, the method comprises screening for the presence of a polynucleotide (in particular comprising a resistance gene or a resistance locus comprising a resistance gene on chromosome 3) comprising molecular marker (allele) ge45717s01 (in the genome of the plant or plant part). In certain embodiments, the method comprises screening for the presence of a polynucleotide (in particular comprising a resistance gene or a resistance locus comprising a resistance gene on chromosome 3) comprising molecular marker (allele) ge45718s01 (in the genome of the plant or plant part). In certain embodiments, the method comprises screening for the presence of a polynucleotide (in particular comprising a resistance gene or a resistance locus comprising a resistance gene on chromosome 3) comprising molecular marker (allele) ge45719s01 (in the genome of the plant or plant part).

[0318] In certain embodiments, the method comprises screening for the presence of one or more molecular marker (allele) selected from ge51829s01, ge51835s01, ge45688s01, ge45691s01, ge45717s01, ge45718s01, and ge45719s01 (in the genome of the plant or plant part).

[0319] In certain embodiments, the method comprises screening for the presence of molecular marker (allele) ge51829s01 (in the genome of the plant or plant part). In certain embodiments, the method comprises screening for the presence of molecular marker (allele) ge51835s01 (in the genome of the plant or plant part). In certain embodiments, the method comprises screening for the presence of molecular marker (allele) ge45688s01 (in the genome of the plant or plant part). In certain embodiments, the method comprises screening for the presence of molecular marker (allele) ge45691s01 (in the genome of the plant or plant part). In certain embodiments, the method comprises screening for the presence of molecular marker (allele) ge45717s01 (in the genome of the plant or plant part). In certain embodiments, the method comprises screening for the presence of molecular marker (allele) ge45718s01 (in the genome of the plant or plant part). In certain embodiments, the method comprises screening for the presence of molecular marker (allele) ge45719s01 (in the genome of the plant or plant part).

[0320] In certain embodiments, the method comprises screening for the presence of one or more molecular marker (allele) selected from ge45717s01 and ge45718s01 (in the genome of the plant or plant part).

[0321] In certain embodiments, the polynucleotide, resistance locus, or resistance gene is flanked by (and optionally includes) molecular markers ge45717s01 and ge45718s01.

[0322] In certain embodiments, the method comprises screening for the presence of a polynucleotide (in particular comprising a resistance gene or a resistance locus comprising a resistance gene on chromosome 3) comprising one or more SNP corresponding to position 573789473, 577673982, 591505046, 592578134, 592685940, 592752433, and 592849403 of Hordeum vulgare reference genome Morex v3.

[0323] In certain embodiments, the method comprises screening for the presence of one or more SNP corresponding to position 573789473, 577673982, 591505046, 592578134, 592685940, 592752433, and 592849403 of Hordeum vulgare reference genome Morex v3.

[0324] In certain embodiments, the method comprises screening for the presence of screening for the presence a SNP corresponding to position 573789473 of Hordeum vulgare reference genome Morex v3, or screening for the presence of a polynucleotide (in particular comprising a resistance gene or a resistance locus comprising a resistance gene on chromosome 3) comprising a SNP corresponding to position 573789473 of Hordeum vulgare reference genome Morex v3. In certain embodiments, the method comprises screening for the presence of screening for the presence a SNP corresponding to position 577673982 of Hordeum vulgare reference genome Morex v3, or screening for the presence of a polynucleotide (in particular comprising a resistance gene or a resistance locus comprising a resistance gene on chromosome 3) comprising a SNP corresponding to position 577673982 of Hordeum vulgare reference genome Morex v3. In certain embodiments, the method comprises screening for the presence of screening for the presence a SNP corresponding to position 591505046 of Hordeum vulgare reference genome Morex v3, or screening for the presence of a polynucleotide (in particular comprising a resistance gene or a resistance locus comprising a resistance gene on chromosome 3) comprising a SNP corresponding to position 591505046, 592578134 of Hordeum vulgare reference genome Morex v3. In certain embodiments, the method comprises screening for the presence of screening for the presence a SNP corresponding to position 592578134 of Hordeum vulgare reference genome Morex v3, or screening for the presence of a polynucleotide (in particular comprising a resistance gene or a resistance locus comprising a resistance gene on chromosome 3) comprising a SNP corresponding to position 592578134 of Hordeum vulgare reference genome Morex v3. In certain embodiments, the method comprises screening for the presence of screening for the presence a SNP corresponding to position 592685940 of Hordeum vulgare reference genome Morex v3, or screening for the presence of a polynucleotide (in particular comprising a resistance gene or a resistance locus comprising a resistance gene on chromosome 3) comprising a SNP corresponding to position 592685940 of Hordeum vulgare reference genome Morex v3. In certain embodiments, the method comprises screening for the presence of screening for the presence a SNP corresponding to position 592752433 of Hordeum vulgare reference genome Morex v3, or screening for the presence of a polynucleotide (in particular comprising a resistance gene or a resistance locus comprising a resistance gene on chromosome 3) comprising a SNP corresponding to position 592752433 of Hordeum vulgare reference genome Morex v3. In certain embodiments, the method comprises screening for the presence of screening for the presence a SNP corresponding to position 592849403 of Hordeum vulgare reference genome Morex v3, or screening for the presence of a polynucleotide (in particular comprising a resistance gene or a resistance locus comprising a resistance gene on chromosome 3) comprising a SNP corresponding to position 592849403 of Hordeum vulgare reference genome Morex v3.

[0325] In certain embodiments, the method comprises screening for the presence of a polynucleic acid comprising a Barley Yellow Dwarf Virus (BYDV) and/or insect resistance gene (in particular comprising a resistance gene or a resistance locus comprising a resistance gene on chromosome 3) or Ryd4Hb gene (on chromosome 3) or coding sequence thereof.

[0326] As used herein, the term “co-segregating” refers to genetic elements which are closely linked and which are typically (i.e. mostly) inherited together, as referred to herein elsewhere (i.e. typically/mostly, no crossing over events occur between the genetic elements, or at least the chance of a crossing-over event is minimized). By means of further guidance, and without limitation, co-segregating genetic elements (such as genes, markers, polymorphisms, etc.) have a genetic distance of at most 10 cM, preferably at most 5 cM, more preferably at most 2 cM, most preferably at most 1 cM, such as at most 0.5 cM or at most 0.1 cM. Alternatively, co-segregating genetic elements (such as genes, markers, polymorphisms, etc.) may have a physical distance of at most 10 Mbp, preferably at most 5 Mbp, more preferably at most 2 Mb, most preferably at most 1 Mbp, such as at most 500 kb or at most 100 kb. Distances preferably are determined between the 3′ end (e.g. the 3′ end of the last exon or the 3′ end of the coding sequence of a gene, or the 3′ end of a marker) of the upstream genetic element and the 5′ end (e.g. the 5′ end of the first exon or the 5′ end of the coding sequence of a gene, or the 5′ end of a marker) of the downstream genetic element. The above considerations are applicable throughout the description whenever reference is made to locations of genetic elements relative to each other.

[0327] In certain embodiments, the resistance locus or QTL is located on a chromosomal interval (on chromosome 3) spanning at most 10 cM, preferably at most 5 cM, more preferably at most 2 cM, most preferably at most 1 cM respectively upstream and downstream of molecular marker (allele) ge45717s01 and ge45718s01 (in the genome of the plant or plant part).

[0328] In an aspect, the invention relates to a method for identifying and/or selecting a barley plant or plant part, comprising screening for the presence of a resistance locus or QTL (allele) (on a polynucleotide located) on a chromosomal interval spanning at most 10 cM, preferably at most 5 cM, more preferably at most 2 cM, most preferably at most 1 cM respectively upstream and downstream of molecular marker (allele) ge45717s01 and ge45718s01 (in the genome of the plant or plant part).

[0329] In an aspect, the invention relates to a method for identifying and/or selecting a barley plant or plant part, comprising screening for the presence of a resistance locus or QTL (allele) (on a polynucleotide located) on a chromosomal interval spanning at most 5 cM, preferably at most 2 cM, most preferably at most 1 cM respectively upstream and downstream of molecular marker (allele) ge45717s01 and ge45718s01 (in the genome of the plant or plant part).

[0330] In an aspect, the invention relates to a method for identifying and/or selecting a barley plant or plant part, comprising screening for the presence of a resistance locus or QTL (allele) (on a polynucleotide located) on a chromosomal interval spanning at most 2 cM, most preferably at most 1 cM respectively upstream and downstream of molecular marker (allele) ge45717s01 and ge45718s01 (in the genome of the plant or plant part).

[0331] In an aspect, the invention relates to a method for identifying and/or selecting a barley plant or plant part, comprising screening for the presence of a resistance locus or QTL (allele) (on a polynucleotide located) on a chromosomal interval spanning at most 1 cM respectively upstream and downstream of molecular marker (allele) ge45717s01 and ge45718s01 (in the genome of the plant or plant part).

[0332] In an aspect, the invention relates to a method for identifying and/or selecting a barley plant or plant part, comprising screening for the presence of a resistance locus or QTL (allele) (on a polynucleotide located) on a chromosomal interval spanning at most 10 Mbp (i.e., 10 mega base pairs), preferably at most 5 Mbp, more preferably at most 2 Mbp, most preferably at most 1 cM respectively upstream and downstream of molecular marker (allele) ge45717s01 and ge45718s01 (in the genome of the plant or plant part).

[0333] In an aspect, the invention relates to a method for identifying and/or selecting a barley plant or plant part, comprising screening for the presence of a resistance locus or QTL (allele) (on a polynucleotide located) on a chromosomal interval spanning at most 5 Mbp, preferably at most 2 Mbp, most preferably at most 1 cM respectively upstream and downstream of molecular marker (allele) ge45717s01 and ge45718s01 (in the genome of the plant or plant part).

[0334] In an aspect, the invention relates to a method for identifying and/or selecting a barley plant or plant part, comprising screening for the presence of a resistance locus or QTL (allele) (on a polynucleotide located) on a chromosomal interval spanning at most 2 Mbp, most preferably at most 1 cM respectively upstream and downstream of molecular marker (allele) ge45717s01 and ge45718s01 (in the genome of the plant or plant part).

[0335] In an aspect, the invention relates to a method for identifying and/or selecting a barley plant or plant part, comprising screening for the presence of a resistance locus or QTL (allele) (on a polynucleotide located) on a chromosomal interval spanning at most 1 cM respectively upstream and downstream of molecular marker (allele) ge45717s01 and ge45718s01 (in the genome of the plant or plant part).

[0336] In certain embodiments, the chromosomal interval is flanked by molecular marker (allele) ge45717s01 and ge45718s01.

[0337] In certain embodiments, the chromosomal interval is flanked by and includes molecular marker (allele) ge45717s01 and ge45718s01.

[0338] In certain embodiments, the chromosomal interval is flanked by and excludes molecular marker (allele) ge45717s01 and ge45718s01.

[0339] As referred to herein, a polynucleic acid, such as for instance a locus (allele), QTL (allele), or gene (allele) as described herein, is said to be flanked by certain molecular markers or molecular marker alleles if the polynucleic acid is comprised within a polynucleic acid wherein respectively a first marker (allele) is located upstream (i.e., 5′) of said polynucleic acid and a second marker (allele) is located downstream (i.e., 3′) of said polynucleic acid. Such first and second marker (allele) may border the polynucleic acid. The nucleic acid may equally comprise such first and second marker (allele), such as respectively at or near the 5′ and 3′ end, for instance respectively within 50 kb of the 5′ and 3′ end, preferably within 10 kb of the 5′ and 3′ end, such as within 5 kb of the 5′ and 3′ end, within 1 kb of the 5′ and 3′ end, or less.

[0340] In an aspect, the invention relates to a method for identifying and/or selecting a barley plant or plant part, such as a barley plant or plant part having (improved) resistance (or tolerance) to Barley Yellow Dwarf Virus (BYDV) and/or insects, comprising screening for the presence of a polynucleotide (in particular comprising a resistance gene or a resistance locus comprising a resistance gene on chromosome 3) comprising one or more molecular marker (allele) selected from ge51829s01, ge51835s01, ge45688s01, ge45691s01, ge45717s01, ge45718s01, and ge45719s01 (in the genome of the plant or plant part).

[0341] In certain embodiments, the method comprises screening for the presence of one or more molecular marker (allele) selected from ge51829s01, ge51835s01, ge45688s01, ge45691s01, ge45717s01, ge45718s01, and ge45719s01 (in the genome of the plant or plant part).

[0342] In an aspect, the invention relates to a method for identifying and/or selecting a barley plant or plant part, such as a barley plant or plant part having (improved) resistance (or tolerance) to Barley Yellow Dwarf Virus (BYDV) and/or insects, comprising screening for the presence of a polynucleotide (in particular comprising a resistance gene or a resistance locus comprising a resistance gene on chromosome 3) comprising one or more molecular marker (allele) selected from ge45717s01 and ge45718s01 (in the genome of the plant or plant part).

[0343] In certain embodiments, the method comprises comprising screening for the presence of one or more molecular marker (allele) selected from ge45717s01 and ge45718s01 (in the genome of the plant or plant part).

[0344] In an aspect, the invention relates to a method for identifying and/or selecting a barley plant or plant part, such as a barley plant or plant part having (improved) resistance (or tolerance) to Barley Yellow Dwarf Virus (BYDV) and/or insects, comprising screening for the presence of molecular marker (allele) ge51829s01 or a polynucleotide (in particular comprising a resistance gene or a resistance locus comprising a resistance gene on chromosome 3) comprising molecular marker (allele) ge51829s01 (in the genome of the plant or plant part).

[0345] In an aspect, the invention relates to a method for identifying and/or selecting a barley plant or plant part, such as a barley plant or plant part having (improved) resistance (or tolerance) to Barley Yellow Dwarf Virus (BYDV) and/or insects, comprising screening for the presence of molecular marker (allele) ge51835s01 or a polynucleotide (in particular comprising a resistance gene or a resistance locus comprising a resistance gene on chromosome 3) comprising molecular marker (allele) ge51835s01 (in the genome of the plant or plant part).

[0346] In an aspect, the invention relates to a method for identifying and/or selecting a barley plant or plant part, such as a barley plant or plant part having (improved) resistance (or tolerance) to Barley Yellow Dwarf Virus (BYDV) and/or insects, comprising screening for the presence of molecular marker (allele) ge45688s01 or a polynucleotide (in particular comprising a resistance gene or a resistance locus comprising a resistance gene on chromosome 3) comprising molecular marker (allele) ge45688s01 (in the genome of the plant or plant part).

[0347] In an aspect, the invention relates to a method for identifying and/or selecting a barley plant or plant part, such as a barley plant or plant part having (improved) resistance (or tolerance) to Barley Yellow Dwarf Virus (BYDV) and/or insects, comprising screening for the presence of molecular marker (allele) ge45691s01 or a polynucleotide (in particular comprising a resistance gene or a resistance locus comprising a resistance gene on chromosome 3) comprising molecular marker (allele) ge45691s01 (in the genome of the plant or plant part).

[0348] In an aspect, the invention relates to a method for identifying and/or selecting a barley plant or plant part, such as a barley plant or plant part having (improved) resistance (or tolerance) to Barley Yellow Dwarf Virus (BYDV) and/or insects, comprising screening for the presence of molecular marker (allele) ge45717s01 or a polynucleotide (in particular comprising a resistance gene or a resistance locus comprising a resistance gene on chromosome 3) comprising molecular marker (allele) ge45717s01 (in the genome of the plant or plant part).

[0349] In an aspect, the invention relates to a method for identifying and/or selecting a barley plant or plant part, such as a barley plant or plant part having (improved) resistance (or tolerance) to Barley Yellow Dwarf Virus (BYDV) and/or insects, comprising screening for the presence of molecular marker (allele) ge45718s01 or a polynucleotide (in particular comprising a resistance gene or a resistance locus comprising a resistance gene on chromosome 3) comprising molecular marker (allele) ge45718s01 (in the genome of the plant or plant part).

[0350] In an aspect, the invention relates to a method for identifying and/or selecting a barley plant or plant part, such as a barley plant or plant part having (improved) resistance (or tolerance) to Barley Yellow Dwarf Virus (BYDV) and/or insects, comprising screening for the presence of molecular marker (allele) ge45719s01, or a polynucleotide (in particular comprising a resistance gene or a resistance locus comprising a resistance gene on chromosome 3) comprising molecular marker (allele) ge45719s01 (in the genome of the plant or plant part).

[0351] In an aspect, the invention relates to a method for identifying and/or selecting a barley plant or plant part, such as a barley plant or plant part having (improved) resistance (or tolerance) to Barley Yellow Dwarf Virus (BYDV) and/or insects, comprising screening for the presence of a polynucleotide (in particular comprising a resistance gene or a resistance locus comprising a resistance gene on chromosome 3) flanked by (and optionally including) molecular marker (allele) ge45717s01 and ge45718s01 (in the genome of the plant or plant part).

[0352] In an aspect, the invention relates to a method for identifying and/or selecting a barley plant or plant part, such as a plant or plant part having (increased) BYDV and/or insect resistance or tolerance, such as in comparison to a plant or plant part not having said polynucleotide, molecular marker (allele), locus (allele), QTL (allele), or SNP (allele) of the invention, comprising screening for the presence of a (resistance) locus (allele) or QTL (allele) (on a polynucleotide located) on a chromosomal interval (on chromosome 3) comprising, comprised in a polynucleotide comprising, or flanked by molecular marker (allele) ge45717s01 and ge45718s01 (in the genome of the plant or plant part).

[0353] In an aspect, the invention relates to a method for identifying and/or selecting a barley plant or plant part, such as a plant or plant part having (increased) BYDV and/or insect resistance or tolerance, such as in comparison to a plant or plant part not having said polynucleotide, molecular marker (allele), locus (allele), QTL (allele), or SNP (allele) of the invention, comprising screening for the presence of a (resistance) locus (allele) or QTL (allele) (on a polynucleotide located) on a chromosomal interval (on chromosome 3) comprising, comprised in a polynucleotide comprising, or flanked by and including molecular marker (allele) ge45717s01 and ge45718s01 (in the genome of the plant or plant part).

[0354] In an aspect, the invention relates to a method for identifying and/or selecting a barley plant or plant part, such as a plant or plant part having (increased) BYDV and/or insect resistance or tolerance, such as in comparison to a plant or plant part not having said polynucleotide, molecular marker (allele), locus (allele), QTL (allele), or SNP (allele) of the invention, comprising screening for the presence of a (resistance) locus (allele) or QTL (allele) (on a polynucleotide located) on a chromosomal interval (on chromosome 3) comprising, comprised in a polynucleotide comprising, or flanked by and excluding molecular marker (allele) ge45717s01 and ge45718s01 (in the genome of the plant or plant part).

[0355] In an aspect, the invention relates to a method for identifying and/or selecting a barley plant or plant part, such as a barley plant or plant part having (improved) resistance (or tolerance) to Barley Yellow Dwarf Virus (BYDV) and/or insects, comprising screening for the presence of a polynucleotide (in particular comprising a resistance gene or a resistance locus comprising a resistance gene on chromosome 3) comprising one or more SNP corresponding to position 573789473, 577673982, 591505046, 592578134, 592685940, 592752433, and 592849403 of Hordeum vulgare reference genome Morex v3.

[0356] In an aspect, the invention relates to a method for identifying and/or selecting a barley plant or plant part, such as a barley plant or plant part having (improved) resistance (or tolerance) to Barley Yellow Dwarf Virus (BYDV) and/or insects, comprising screening for the presence of a SNP corresponding to position 573789473 of Hordeum vulgare reference genome Morex v3, or screening for the presence of a polynucleotide (in particular comprising a resistance gene or a resistance locus comprising a resistance gene on chromosome 3) comprising a SNP corresponding to position 573789473 of Hordeum vulgare reference genome Morex v3. In an aspect, the invention relates to a method for identifying and/or selecting a barley plant or plant part, such as a barley plant or plant part having (improved) resistance (or tolerance) to Barley Yellow Dwarf Virus (BYDV) and/or insects, comprising screening for the presence of a SNP corresponding to position 577673982 of Hordeum vulgare reference genome Morex v3, or screening for the presence of a polynucleotide (in particular comprising a resistance gene or a resistance locus comprising a resistance gene on chromosome 3) comprising a SNP corresponding to position 577673982 of Hordeum vulgare reference genome Morex v3. In an aspect, the invention relates to a method for identifying and/or selecting a barley plant or plant part, such as a barley plant or plant part having (improved) resistance (or tolerance) to Barley Yellow Dwarf Virus (BYDV) and/or insects, comprising screening for the presence of a SNP corresponding to position 591505046 of Hordeum vulgare reference genome Morex v3, or screening for the presence of a polynucleotide (in particular comprising a resistance gene or a resistance locus comprising a resistance gene on chromosome 3) comprising a SNP corresponding to position 591505046, 592578134 of Hordeum vulgare reference genome Morex v3. In an aspect, the invention relates to a method for identifying and/or selecting a barley plant or plant part, such as a barley plant or plant part having (improved) resistance (or tolerance) to Barley Yellow Dwarf Virus (BYDV) and/or insects, comprising screening for the presence of a SNP corresponding to position 592578134 of Hordeum vulgare reference genome Morex v3, or screening for the presence of a polynucleotide (in particular comprising a resistance gene or a resistance locus comprising a resistance gene on chromosome 3) comprising a SNP corresponding to position 592578134 of Hordeum vulgare reference genome Morex v3. In an aspect, the invention relates to a method for identifying and/or selecting a barley plant or plant part, such as a barley plant or plant part having (improved) resistance (or tolerance) to Barley Yellow Dwarf Virus (BYDV) and/or insects, comprising screening for the presence of a SNP corresponding to position 592685940 of Hordeum vulgare reference genome Morex v3, or screening for the presence of a polynucleotide (in particular comprising a resistance gene or a resistance locus comprising a resistance gene on chromosome 3) comprising a SNP corresponding to position 592685940 of Hordeum vulgare reference genome Morex v3. In an aspect, the invention relates to a method for identifying and/or selecting a barley plant or plant part, such as a barley plant or plant part having (improved) resistance (or tolerance) to Barley Yellow Dwarf Virus (BYDV) and/or insects, comprising screening for the presence of a SNP corresponding to position 592752433 of Hordeum vulgare reference genome Morex v3, or screening for the presence of a polynucleotide (in particular comprising a resistance gene or a resistance locus comprising a resistance gene on chromosome 3) comprising a SNP corresponding to position 592752433 of Hordeum vulgare reference genome Morex v3. In an aspect, the invention relates to a method for identifying and/or selecting a barley plant or plant part, such as a barley plant or plant part having (improved) resistance (or tolerance) to Barley Yellow Dwarf Virus (BYDV) and/or insects, comprising screening for the presence of a SNP corresponding to position 592849403 of Hordeum vulgare reference genome Morex v3, or screening for the presence of a polynucleotide (in particular comprising a resistance gene or a resistance locus comprising a resistance gene on chromosome 3) comprising a SNP corresponding to position 592849403 of Hordeum vulgare reference genome Morex v3.

[0357] In an aspect, the invention relates to a method for identifying and/or selecting a barley plant or plant part, such as a barley plant or plant part having (improved) resistance (or tolerance) to Barley Yellow Dwarf Virus (BYDV) and/or insects, comprising screening for the presence of a polynucleic acid comprising a Barley Yellow Dwarf Virus (BYDV) and/or insect resistance gene (in particular comprising a resistance gene or a resistance locus comprising a resistance gene on chromosome 3) or Ryd4Hb gene (on chromosome 3) or coding sequence thereof.

[0358] In an aspect, the invention relates to a method for identifying and/or selecting a barley plant or plant part, such as a barley plant or plant part having (improved) resistance (or tolerance) to Barley Yellow Dwarf Virus (BYDV) and/or insects, comprising screening for the presence of a Barley Yellow Dwarf Virus (BYDV) and/or insect resistance gene (in particular comprising a resistance gene or a resistance locus comprising a resistance gene on chromosome 3) or Ryd4Hb gene (in particular comprising a resistance gene or a resistance locus comprising a resistance gene on chromosome 3) or coding sequence thereof.

[0359] In certain embodiments, the methods described above comprise screening for the presence or absence of one or more molecular marker co-segregating with resistance locus comprising a resistance gene located on chromosome 3 in a region comprising
[0360] a) the nucleotide sequence having SEQ ID NO: 1,
[0361] b) a nucleotide sequence hybridizing with the nucleotide sequence of a) or a complement thereof or a reverse complement thereof under stringent conditions,
[0362] c) a nucleotide sequence having an identity of at least 90% to the nucleotide sequence of a).

[0363] In an aspect, the invention relates to a method for identifying and/or selecting barley plant or plant part having a Yellow Dwarf Virus (BYDV) and/or insect resistance gene or Ryd4Hb gene, said gene has
[0364] (1) a genomic sequence of HORVU.MOREX.r2.3HG0265710, HORVU.MOREX.r2.3HG0265660, HORVU.MOREX.r2.3HG0265670, HORVU.MOREX.r2.3HG0265690, or HORVU.MOREX.r2.3HG0265720; or a sequence which is at least at least 90%, preferably at least 95%, identical to a genomic sequence of HORVU.MOREX.r2.3HG0265710, HORVU.MOREX.r2.3HG0265660, HORVU.MOREX.r2.3HG0265670, HORVU.MOREX.r2.3HG0265690, or HORVU.MOREX.r2.3HG0265720;
[0365] (2) a coding sequence of HORVU.MOREX.r2.3HG0265710, HORVU.MOREX.r2.3HG0265660, HORVU.MOREX.r2.3HG0265670, HORVU.MOREX.r2.3HG0265690, or HORVU.MOREX.r2.3HG0265720, or a coding sequence which is at least 90%, preferably at least 95%, identical to a coding sequence of HORVU.MOREX.r2.3HG0265710, HORVU.MOREX.r2.3HG0265660, HORVU.MOREX.r2.3HG0265670, HORVU.MOREX.r2.3HG0265690, or HORVU.MOREX.r2.3HG0265720;
[0366] (3) a sequence encoding a HORVU.MOREX.r2.3HG0265710, HORVU.MOREX.r2.3HG0265660, HORVU.MOREX.r2.3HG0265670, HORVU.MOREX.r2.3HG0265690, or HORVU.MOREX.r2.3HG0265720 protein; or encoding a protein having a sequence which is at least 90%, preferably at least 95%, identical to a protein sequence of HORVU.MOREX.r2.3HG0265710, HORVU.MOREX.r2.3HG0265660, HORVU.MOREX.r2.3HG0265670, HORVU.MOREX.r2.3HG0265690, or HORVU.MOREX.r2.3HG0265720; and/or
[0367] (4) a sequence hybridizing with the sequence of (1), (2), and/or (3) or a complement thereof or a reverse complement thereof (under stringent conditions); or
[0368] (5) a nucleotide sequence encoding a protein derived from the amino acid sequence encoded by the nucleotide sequence of (1) to (4) by way of substitution, deletion and/or addition of one or more amino acid(s);
[0369] comprising wherein screening for the presence of (a polynucleic acid comprising) any one or more of ge51829s01, ge51835s01, ge45688s01, ge45691s01, ge45717s01, ge45718s01, and ge45719s01 or any one or more molecular markers having a sequence as set forth in SEQ ID NOs: 3 to 9 (in the genome of the plant or plant part).

[0370] In an aspect, the invention relates to a method for identifying and/or selecting a barley plant or plant part having a Yellow Dwarf Virus (BYDV) and/or insect resistance locus comprising a resistance gene or Ryd4Hb gene, said gene has
[0371] (1) a genomic sequence of HORVU.MOREX.r2.3HG0265710, HORVU.MOREX.r2.3HG0265660, HORVU.MOREX.r2.3HG0265670, HORVU.MOREX.r2.3HG0265690, or HORVU.MOREX.r2.3HG0265720; or a sequence which is at least at least 90%, preferably at least 95%, identical to a genomic sequence of HORVU.MOREX.r2.3HG0265710, HORVU.MOREX.r2.3HG0265660, HORVU.MOREX.r2.3HG0265670, HORVU.MOREX.r2.3HG0265690, or HORVU.MOREX.r2.3HG0265720;
[0372] (2) a coding sequence of HORVU.MOREX.r2.3HG0265710, HORVU.MOREX.r2.3HG0265660, HORVU.MOREX.r2.3HG0265670, HORVU.MOREX.r2.3HG0265690, or HORVU.MOREX.r2.3HG0265720, or a coding sequence which is at least 90%, preferably at least 95%, identical to a coding sequence of HORVU.MOREX.r2.3HG0265710, HORVU.MOREX.r2.3HG0265660, HORVU.MOREX.r2.3HG0265670, HORVU.MOREX.r2.3HG0265690, or HORVU.MOREX.r2.3HG0265720;
[0373] (3) a sequence encoding a HORVU.MOREX.r2.3HG0265710, HORVU.MOREX.r2.3HG0265660, HORVU.MOREX.r2.3HG0265670, HORVU.MOREX.r2.3HG0265690, or HORVU.MOREX.r2.3HG0265720 protein; or encoding a protein having a sequence which is at least 90%, preferably at least 95%, identical to a protein sequence of HORVU.MOREX.r2.3HG0265710, HORVU.MOREX.r2.3HG0265660, HORVU.MOREX.r2.3HG0265670, HORVU.MOREX.r2.3HG0265690, or HORVU.MOREX.r2.3HG0265720; and/or
[0374] (4) a sequence hybridizing with the sequence of (1), (2), and/or (3) or a complement thereof or a reverse complement thereof (under stringent conditions); or
[0375] (5) a nucleotide sequence encoding a protein derived from the amino acid sequence encoded by the nucleotide sequence of (1) to (4) by way of substitution, deletion and/or addition of one or more amino acid(s);
[0376] comprising wherein screening for the presence of a marker haplotype comprising: cytosine (C) or thymine (T) at a position corresponding to position 592685940 of reference genome MOREX v3, and thymine (T) at a position corresponding to position 592752433 of reference genome MOREX v3, optionally further comprising
[0377] (1) adenine (A) at a position corresponding to position 573789473 of reference genome MOREX v3, cytosine (C) at a position corresponding to position 577673982 of reference genome MOREX v3, guanine (G) at a position corresponding to position 591505046 of reference genome MOREX v3, adenine (A) at a position corresponding to position 592578134 of reference genome MOREX v3, and thymine (T) at a position corresponding to position 592849403 of reference genome MOREX v3;
[0378] (II) adenine (A) at a position corresponding to position 573789473 of reference genome MOREX v3, guanine (G) at a position corresponding to position 577673982 of reference genome MOREX v3, guanine (G) at a position corresponding to position 591505046 of reference genome MOREX v3, adenine (A) at a position corresponding to position 592578134 of reference genome MOREX v3, and thymine (T) at a position corresponding to position 592849403 of reference genome MOREX v3;
[0379] (III) adenine (A) at a position corresponding to position 573789473 of reference genome MOREX v3, guanine (G) at a position corresponding to position 577673982 of reference genome MOREX v3, thymine (T) at a position corresponding to position 591505046 of reference genome MOREX v3, adenine (A) at a position corresponding to position 592578134 of reference genome MOREX v3, and thymine (T) at a position corresponding to position 592849403 of reference genome MOREX v3;
[0380] (IV) adenine (A) at a position corresponding to position 573789473 of reference genome MOREX v3, guanine (G) at a position corresponding to position 577673982 of reference genome MOREX v3, thymine (T) at a position corresponding to position 591505046 of reference genome MOREX v3, guanine (G) at a position corresponding to position 592578134 of reference genome MOREX v3, and thymine (T) at a position corresponding to position 592849403 of reference genome MOREX v3;
[0381] (V) guanine (G) at a position corresponding to position 573789473 of reference genome MOREX v3, cytosine (C) at a position corresponding to position 577673982 of reference genome MOREX v3, guanine (G) at a position corresponding to position 591505046 of reference genome MOREX v3, adenine (A) at a position corresponding to position 592578134 of reference genome MOREX v3, and cytosine (C) at a position corresponding to position 592849403 of reference genome MOREX v3;
[0382] (VI) adenine (A) at a position corresponding to position 573789473 of reference genome MOREX v3, cytosine (C) at a position corresponding to position 577673982 of reference genome MOREX v3, guanine (G) at a position corresponding to position 591505046 of reference genome MOREX v3, adenine (A) at a position corresponding to position 592578134 of reference genome MOREX v3, and cytosine (C) at a position corresponding to position 592849403 of reference genome MOREX v3;
[0383] (VII) adenine (A) at a position corresponding to position 573789473 of reference genome MOREX v3, guanine (G) at a position corresponding to position 577673982 of reference genome MOREX v3, guanine (G) at a position corresponding to position 591505046 of reference genome MOREX v3, adenine (A) at a position corresponding to position 592578134 of reference genome MOREX v3, and cytosine (C) at a position corresponding to position 592849403 of reference genome MOREX v3;
[0384] (VIII) adenine (A) at a position corresponding to position 573789473 of reference genome MOREX v3, guanine (G) at a position corresponding to position 577673982 of reference genome MOREX v3, thymine (T) at a position corresponding to position 591505046 of reference genome MOREX v3, adenine (A) at a position corresponding to position 592578134 of reference genome MOREX v3, and cytosine (C) at a position corresponding to position 592849403 of reference genome MOREX v3; or
[0385] (IX) adenine (A) at a position corresponding to position 573789473 of reference genome MOREX v3, guanine (G) at a position corresponding to position 577673982 of reference genome MOREX v3, thymine (T) at a position corresponding to position 591505046 of reference genome MOREX v3, guanine (G) at a position corresponding to position 592578134 of reference genome MOREX v3, and cytosine (C) at a position corresponding to position 592849403 of reference genome MOREX v3
[0386] (X) thymine (T) at position 591505046 with reference to genome MOREX v3, guanine (G) at position 592578134 with reference to genome MOREX v3, and thymine (T) at position 592849403 with reference to genome MOREX v3; or
[0387] (XI) guanine (G) at position 591505046 with reference to genome MOREX v3, adenine (A) at position 592578134 with reference to genome MOREX v3, and thymine (T) at position 592849403 with reference to genome MOREX v3.

[0388] Preferably, said resistance locus has
[0389] a) the nucleotide sequence having SEQ ID NO: 1,
[0390] b) a nucleotide sequence hybridizing with the nucleotide sequence of a) or a complement thereof or a reverse complement thereof under stringent conditions,
[0391] c) a nucleotide sequence having an identity of at least 90% to the nucleotide sequence of a).

[0392] In certain embodiments, the markers are located in a region
[0393] i. between position 573789473 of reference genome MOREX v3 or a position corresponding to position 573789473 of reference genome MOREX v3, detectable by molecular marker ge51829s01 and (the 5′ end of) the resistance gene (such as HORVU.MOREX.r2.3HG0265710, HORVU.MOREX.r2.3HG0265660, HORVU.MOREX.r2.3HG0265670, HORVU.MOREX.r2.3HG0265690, or HORVU.MOREX.r2.3HG0265720),
[0394] ii. between position 577673982 of reference genome MOREX v3 or a position corresponding to position 577673982 of reference genome MOREX v3, detectable by molecular marker ge51835s01 and the (the 5′ end of) resistance gene (such as HORVU.MOREX.r2.3HG0265710, HORVU.MOREX.r2.3HG0265660, HORVU.MOREX.r2.3HG0265670, HORVU.MOREX.r2.3HG0265690, or HORVU.MOREX.r2.3HG0265720),
[0395] iii. between position 591505046 of reference genome MOREX v3 or a position corresponding to position 591505046 of reference genome MOREX v3, detectable by molecular marker ge45688s01 and the (the 5′ end of) resistance gene (such as HORVU.MOREX.r2.3HG0265710, HORVU.MOREX.r2.3HG0265660, HORVU.MOREX.r2.3HG0265670, HORVU.MOREX.r2.3HG0265690, or HORVU.MOREX.r2.3HG0265720),
[0396] iv. between position 592578134 of reference genome MOREX v3 or a position corresponding to position 592578134 of reference genome MOREX v3, detectable by molecular marker ge45691s01 and the (the 5′ end of) resistance gene (such as HORVU.MOREX.r2.3HG0265710, HORVU.MOREX.r2.3HG0265660, HORVU.MOREX.r2.3HG0265670, HORVU.MOREX.r2.3HG0265690, or HORVU.MOREX.r2.3HG0265720),
[0397] v. between position 592685940 of reference genome MOREX v3 or a position corresponding to position 592685940 of reference genome MOREX v3, detectable by molecular marker ge45717s01 and the (the 5′ end of) resistance gene (such as HORVU.MOREX.r2.3HG0265710, HORVU.MOREX.r2.3HG0265660, HORVU.MOREX.r2.3HG0265670, HORVU.MOREX.r2.3HG0265690, or HORVU.MOREX.r2.3HG0265720),
[0398] vi. between the (the 5′ end of) resistance gene (such as HORVU.MOREX.r2.3HG0265710, HORVU.MOREX.r2.3HG0265660, HORVU.MOREX.r2.3HG0265670, HORVU.MOREX.r2.3HG0265690, or HORVU.MOREX.r2.3HG0265720) and position 592752433 of reference genome MOREX v3 or a position corresponding to position 592752433 of reference genome MOREX v3, detectable by molecular marker ge45718s01, or
[0399] vii. between the (the 5′ end of) resistance gene (such as HORVU.MOREX.r2.3HG0265710, HORVU.MOREX.r2.3HG0265660, HORVU.MOREX.r2.3HG0265670, HORVU.MOREX.r2.3HG0265690, or HORVU.MOREX.r2.3HG0265720) and position 592849403 of reference genome MOREX v3 or a position corresponding to position 592849403 of reference genome MOREX v3, detectable by molecular marker ge45719s01.

[0400] In certain embodiments, the markers are located in a region between position 573789473 of reference genome MOREX v3 or a position corresponding to position 573789473 of reference genome MOREX v3, detectable by molecular marker ge51829s01 and (the 5′ end of) the resistance gene (such as HORVU.MOREX.r2.3HG0265710, HORVU.MOREX.r2.3HG0265660, HORVU.MOREX.r2.3HG0265670, HORVU.MOREX.r2.3HG0265690, or HORVU.MOREX.r2.3HG0265720). In certain embodiments, the markers are located in a region between position 577673982 of reference genome MOREX v3 or a position corresponding to position 577673982 of reference genome MOREX v3, detectable by molecular marker ge51835s01 and the (the 5′ end of) resistance gene (such as HORVU.MOREX.r2.3HG0265710, HORVU.MOREX.r2.3HG0265660, HORVU.MOREX.r2.3HG0265670, HORVU.MOREX.r2.3HG0265690, or HORVU.MOREX.r2.3HG0265720). In certain embodiments, the markers are located in a region between position 591505046 of reference genome MOREX v3 or a position corresponding to position 591505046 of reference genome MOREX v3, detectable by molecular marker ge45688s01 and the (the 5′ end of) resistance gene (such as HORVU.MOREX.r2.3HG0265710, HORVU.MOREX.r2.3HG0265660, HORVU.MOREX.r2.3HG0265670, HORVU.MOREX.r2.3HG0265690, or HORVU.MOREX.r2.3HG0265720). In certain embodiments, the markers are located in a region between position 592578134 of reference genome MOREX v3 or a position corresponding to position 592578134 of reference genome MOREX v3, detectable by molecular marker ge45691s01 and the (the 5′ end of) resistance gene (such as HORVU.MOREX.r2.3HG0265710, HORVU.MOREX.r2.3HG0265660, HORVU.MOREX.r2.3HG0265670, HORVU.MOREX.r2.3HG0265690, or HORVU.MOREX.r2.3HG0265720). In certain embodiments, the markers are located in a region between position 592685940 of reference genome MOREX v3 or a position corresponding to position 592685940 of reference genome MOREX v3, detectable by molecular marker ge45717s01 and the (the 5′ end of) resistance gene (such as HORVU.MOREX.r2.3HG0265710, HORVU.MOREX.r2.3HG0265660, HORVU.MOREX.r2.3HG0265670, HORVU.MOREX.r2.3HG0265690, or HORVU.MOREX.r2.3HG0265720). In certain embodiments, the markers are located in a region between the (the 5′ end of) resistance gene (such as HORVU.MOREX.r2.3HG0265710, HORVU.MOREX.r2.3HG0265660, HORVU.MOREX.r2.3HG0265670, HORVU.MOREX.r2.3HG0265690, or HORVU.MOREX.r2.3HG0265720) and position 592752433 of reference genome MOREX v3 or a position corresponding to position 592752433 of reference genome MOREX v3, detectable by molecular marker ge45718s01. In certain embodiments, the markers are located in a region between the (the 5′ end of) resistance gene (such as HORVU.MOREX.r2.3HG0265710, HORVU.MOREX.r2.3HG0265660, HORVU.MOREX.r2.3HG0265670, HORVU.MOREX.r2.3HG0265690, or HORVU.MOREX.r2.3HG0265720) and position 592849403 of reference genome MOREX v3 or a position corresponding to position 592849403 of reference genome MOREX v3, detectable by molecular marker ge45719s01.

[0401] In certain embodiments, the locus, QTL, polynucleotide, or gene of the invention as described herein comprises one or more molecular marker (allele) selected from ge51829s01, ge51835s01, ge45688s01, ge45691s01, ge45717s01, ge45718s01, and ge45719s01. In certain embodiments, the locus, QTL, polynucleotide, or gene of the invention as described herein comprises two or more molecular marker (allele) selected from ge51829s01, ge51835s01, ge45688s01, ge45691s01, ge45717s01, ge45718s01, and ge45719s01. In certain embodiments, the locus, QTL, polynucleotide, or gene of the invention as described herein comprises three or more molecular marker (allele) selected from ge51829s01, ge51835s01, ge45688s01, ge45691s01, ge45717s01, ge45718s01, and ge45719s01. In certain embodiments, the locus, QTL, polynucleotide, or gene of the invention as described herein comprises four or more molecular marker (allele) selected from ge51829s01, ge51835s01, ge45688s01, ge45691s01, ge45717s01, ge45718s01, and ge45719s01. In certain embodiments, the locus, QTL, polynucleotide, or gene of the invention as described herein comprises five or more molecular marker (allele) selected from ge51829s01, ge51835s01, ge45688s01, ge45691s01, ge45717s01, ge45718s01, and ge45719s01. In certain embodiments, the locus, QTL, polynucleotide, or gene of the invention as described herein comprises six or more molecular marker (allele) selected from ge51829s01, ge51835s01, ge45688s01, ge45691s01, ge45717s01, ge45718s01, and ge45719s01. In certain embodiments, the locus, QTL, polynucleotide, or gene of the invention as described herein comprises molecular marker (allele) ge51829s01, ge51835s01, ge45688s01, ge45691s01, ge45717s01, ge45718s01, and ge45719s01.

[0402] In certain embodiments, the locus, QTL, polynucleotide, or gene of the invention as described herein comprises molecular marker (allele) ge51829s01. In certain embodiments, the locus, QTL, polynucleotide, or gene of the invention as described herein comprises molecular marker (allele) ge51835s01. In certain embodiments, the locus, QTL, polynucleotide, or gene of the invention as described herein comprises molecular marker (allele) ge45688s01. In certain embodiments, the locus, QTL, polynucleotide, or gene of the invention as described herein comprises molecular marker (allele) ge45691s01. In certain embodiments, the locus, QTL, polynucleotide, or gene of the invention as described herein comprises molecular marker (allele) ge45717s01. In certain embodiments, the locus, QTL, polynucleotide, or gene of the invention as described herein comprises molecular marker (allele) ge45718s01. In certain embodiments, the locus, QTL, polynucleotide, or gene of the invention as described herein comprises molecular marker (allele) ge45719s01.

[0403] In certain embodiments, the locus, QTL, polynucleotide, or gene of the invention as described herein comprises molecular marker (allele) combinations selected from the following lists:
[0404] ge51829s01,ge51835s01
[0405] ge51829s01,ge45688s01
[0406] ge51829s01,ge45691s01
[0407] ge51829s01,ge45717s01
[0408] ge51829s01,ge45718s01
[0409] ge51829s01,ge45719s01
[0410] ge51835s01,ge45688s01
[0411] ge51835s01,ge45691s01
[0412] ge51835s01,ge45717s01
[0413] ge51835s01,ge45718s01
[0414] ge51835s01,ge45719s01
[0415] ge45688s01,ge45691s01
[0416] ge45688s01,ge45717s01
[0417] ge45688s01,ge45718s01
[0418] ge45688s01,ge45719s01
[0419] ge45691s01,ge45717s01
[0420] ge45691s01,ge45718s01
[0421] ge45691s01,ge45719s01
[0422] ge45717s01,ge45718s01
[0423] ge45717s01,ge45719s01
[0424] ge45718s01,ge45719s01
[0425] ge51829s01,ge51835s01,ge45688s01
[0426] ge51829s01,ge51835s01,ge45691s01
[0427] ge51829s01,ge51835s01,ge45717s01
[0428] ge51829s01,ge51835s01,ge45718s01
[0429] ge51829s01,ge51835s01,ge45719s01
[0430] ge51829s01,ge45688s01,ge45691s01
[0431] ge51829s01,ge45688s01,ge45717s01
[0432] ge51829s01,ge45688s01,ge45718s01
[0433] ge51829s01,ge45688s01,ge45719s01
[0434] ge51829s01,ge45691s01,ge45717s01
[0435] ge51829s01,ge45691s01,ge45718s01
[0436] ge51829s01,ge45691s01,ge45719s01
[0437] ge51829s01,ge45717s01,ge45718s01
[0438] ge51829s01,ge45717s01,ge45719s01
[0439] ge51829s01,ge45718s01,ge45719s01
[0440] ge51835s01,ge45688s01,ge45691s01
[0441] ge51835s01,ge45688s01,ge45717s01
[0442] ge51835s01,ge45688s01,ge45718s01
[0443] ge51835s01,ge45688s01,ge45719s01
[0444] ge51835s01,ge45691s01,ge45717s01
[0445] ge51835s01,ge45691s01,ge45718s01
[0446] ge51835s01,ge45691s01,ge45719s01
[0447] ge51835s01,ge45717s01,ge45718s01
[0448] ge51835s01,ge45717s01,ge45719s01
[0449] ge51835s01,ge45718s01,ge45719s01
[0450] ge45688s01,ge45691s01,ge45717s01
[0451] ge45688s01,ge45691s01,ge45718s01
[0452] ge45688s01,ge45691s01,ge45719s01
[0453] ge45688s01,ge45717s01,ge45718s01
[0454] ge45688s01,ge45717s01,ge45719s01
[0455] ge45688s01,ge45718s01,ge45719s01
[0456] ge45691s01,ge45717s01,ge45718s01
[0457] ge45691s01,ge45717s01,ge45719s01
[0458] ge45691s01,ge45718s01,ge45719s01
[0459] ge45717s01,ge45718s01,ge45719s01
[0460] ge51829s01,ge51835s01,ge45688s01,ge45691s01
[0461] ge51829s01,ge51835s01,ge45688s01,ge45717s01
[0462] ge51829s01,ge51835s01,ge45688s01,ge45718s01
[0463] ge51829s01,ge51835s01,ge45688s01,ge45719s01
[0464] ge51829s01,ge51835s01,ge45691s01,ge45717s01
[0465] ge51829s01,ge51835s01,ge45691s01,ge45718s01
[0466] ge51829s01,ge51835s01,ge45691s01,ge45719s01
[0467] ge51829s01,ge51835s01,ge45717s01,ge45718s01
[0468] ge51829s01,ge51835s01,ge45717s01,ge45719s01
[0469] ge51829s01,ge51835s01,ge45718s01,ge45719s01
[0470] ge51829s01,ge45688s01,ge45691s01,ge45717s01
[0471] ge51829s01,ge45688s01,ge45691s01,ge45718s01
[0472] ge51829s01,ge45688s01,ge45691s01,ge45719s01
[0473] ge51829s01,ge45688s01,ge45717s01,ge45718s01
[0474] ge51829s01,ge45688s01,ge45717s01,ge45719s01
[0475] ge51829s01,ge45688s01,ge45718s01,ge45719s01
[0476] ge51829s01,ge45691s01,ge45717s01,ge45718s01
[0477] ge51829s01,ge45691s01,ge45717s01,ge45719s01
[0478] ge51829s01,ge45691s01,ge45718s01,ge45719s01
[0479] ge51829s01,ge45717s01,ge45718s01,ge45719s01
[0480] ge51835s01,ge45688s01,ge45691s01,ge45717s01
[0481] ge51835s01,ge45688s01,ge45691s01,ge45718s01
[0482] ge51835s01,ge45688s01,ge45691s01,ge45719s01
[0483] ge51835s01,ge45688s01,ge45717s01,ge45718s01
[0484] ge51835s01,ge45688s01,ge45717s01,ge45719s01
[0485] ge51835s01,ge45688s01,ge45718s01,ge45719s01
[0486] ge51835s01,ge45691s01,ge45717s01,ge45718s01
[0487] ge51835s01,ge45691s01,ge45717s01,ge45719s01
[0488] ge51835s01,ge45691s01,ge45718s01,ge45719s01
[0489] ge51835s01,ge45717s01,ge45718s01,ge45719s01
[0490] ge45688s01,ge45691s01,ge45717s01,ge45718s01
[0491] ge45688s01,ge45691s01,ge45717s01,ge45719s01
[0492] ge45688s01,ge45691s01,ge45718s01,ge45719s01
[0493] ge45688s01,ge45717s01,ge45718s01,ge45719s01
[0494] ge45691s01,ge45717s01,ge45718s01,ge45719s01
[0495] ge51829s01,ge51835s01,ge45688s01,ge45691s01,ge45717s01
[0496] ge51829s01,ge51835s01,ge45688s01,ge45691s01,ge45718s01
[0497] ge51829s01,ge51835s01,ge45688s01,ge45691s01,ge45719s01
[0498] ge51829s01,ge51835s01,ge45688s01,ge45717s01,ge45718s01
[0499] ge51829s01,ge51835s01,ge45688s01,ge45717s01,ge45719s01
[0500] ge51829s01,ge51835s01,ge45688s01,ge45718s01,ge45719s01
[0501] ge51829s01,ge51835s01,ge45691s01,ge45717s01,ge45718s01
[0502] ge51829s01,ge51835s01,ge45691s01,ge45717s01,ge45719s01
[0503] ge51829s01,ge51835s01,ge45691s01,ge45718s01,ge45719s01
[0504] ge51829s01,ge51835s01,ge45717s01,ge45718s01,ge45719s01
[0505] ge51829s01,ge45688s01,ge45691s01,ge45717s01,ge45718s01
[0506] ge51829s01,ge45688s01,ge45691s01,ge45717s01,ge45719s01
[0507] ge51829s01,ge45688s01,ge45691s01,ge45718s01,ge45719s01
[0508] ge51829s01,ge45688s01,ge45717s01,ge45718s01,ge45719s01
[0509] ge51829s01,ge45691s01,ge45717s01,ge45718s01,ge45719s01
[0510] ge51835s01,ge45688s01,ge45691s01,ge45717s01,ge45718s01
[0511] ge51835s01,ge45688s01,ge45691s01,ge45717s01,ge45719s01
[0512] ge51835s01,ge45688s01,ge45691s01,ge45718s01,ge45719s01
[0513] ge51835s01,ge45688s01,ge45717s01,ge45718s01,ge45719s01
[0514] ge51835s01,ge45691s01,ge45717s01,ge45718s01,ge45719s01
[0515] ge45688s01,ge45691s01,ge45717s01,ge45718s01,ge45719s01
[0516] ge51829s01,ge51835s01,ge45688s01,ge45691s01,ge45717s01,ge45718s01
[0517] ge51829s01,ge51835s01,ge45688s01,ge45691s01,ge45717s01,ge45719s01
[0518] ge51829s01,ge51835s01,ge45688s01,ge45691s01,ge45718s01,ge45719s01
[0519] ge51829s01,ge51835s01,ge45688s01,ge45717s01,ge45718s01,ge45719s01
[0520] ge51829s01,ge51835s01,ge45691s01,ge45717s01,ge45718s01,ge45719s01
[0521] ge51829s01,ge45688s01,ge45691s01,ge45717s01,ge45718s01,ge45719s01 and
[0522] ge51835s01,ge45688s01,ge45691s01,ge45717s01,ge45718s01,ge45719s01.

[0523] In certain embodiments, the plant or plant part is identified if the polynucleotide, QTL, locus, gene(s), marker(s), allele(s) and/or haplotype of the invention as described herein are identified (in the genome of the plant or plant part).

[0524] In certain embodiments, the plant or plant part is identified as having (increased) BYDV and/or insect resistance and/or tolerance, if the polynucleotide, QTL, locus, gene(s), marker(s), allele(s) and/or haplotype of the invention as described herein are identified (in the genome of the plant or plant part).

[0525] In certain embodiments, the plant or plant part is identified as having BYDV and/or insect resistance and/or tolerance, if the polynucleotide, QTL, locus, gene(s), marker(s), allele(s) and/or haplotype of the invention as described herein are identified (in the genome of the plant or plant part).

[0526] In certain embodiments, the plant or plant part is identified as having increased BYDV and/or insect resistance and/or tolerance, if the polynucleotide, QTL, locus, gene(s), marker(s), allele(s) and/or haplotype of the invention as described herein are identified (in the genome of the plant or plant part).

[0527] In certain embodiments, the methods for identifying or selecting the plant or plant part of the invention as described herein further comprise selecting the plant or plant part if the polynucleotide, QTL, locus, gene(s), marker(s), allele(s) and/or haplotype of the invention as described herein are identified (in the genome of the plant or plant part).

[0528] Preferred molecular markers of the invention as described herein are ge51829s01, ge51835s01, ge45688s01, ge45691s01, ge45717s01, ge45718s01, and ge45719s01.

[0529] More preferred molecular markers of the invention as described herein are ge45717s01 and ge45718s01.

[0530] The polynucleic acid, QTL, (resistance) gene(s), locus, marker(s), SNPs, and/or allele(s) of the present invention as described herein may be, and preferably are, located on chromosome 3H, preferably 3HL (i.e. the long arm of chromosome 3), of Hordeum vulgare, or the corresponding chromosome of another Hordeum species, or another chromosome comprising the corresponding locus in another Hordeum species. The skilled person is well aware which chromosomes or chromosomal regions correspond between Hordeum species, based on the genomic context, as is known in the art. The skilled person will further appreciate that for instance translocations of certain genomic segments during evolution, may result in otherwise corresponding chromosomal regions not necessarily residing anymore on corresponding chromosomes. Nevertheless, the local genetic context may identify such regions (possibly on different chromosomes) as “corresponding”.

[0531] As used herein the terms “increased/improved pathogen or virus or insect tolerance” and “increased/improved pathogen or virus or insect resistance”, or more generally “resistance” or “tolerance” and the like, relate to any relief from, reduced presentation of, improvement of, or any combination thereof of any symptom (such as damage or loss in biomass, in dry matter yield/content or in seed yield) of an infection by a pathogen, virus, or insect. Increased pathogen/virus/insect resistance or tolerance as referred to herein may also relate to the ability to which a plant maintains for instance its biomass production (such as harvestable biomass production, such as seed yield) upon or during pathogen (including viruses, such as BYDV, or insects, such as aphids) infection. A (increased) pathogen resistant or tolerant plant, plant cell or plant part may refer herein to a plant, plant cell or plant part, respectively, having increased resistance/tolerance to a pathogen compared to a (parent) plant from which they are derived (e.g., not comprising the QTL allele or one or more of the molecular marker (allele), SNP (allele), locus (allele), or (resistant conferring) polynucleic acid or gene(s) according to the invention as described herein). Resistance may relate herein to the plant's ability to limit pathogen multiplication. Tolerance may relate herein to a plant's ability to reduce the effect of infection on its fitness regardless of the level of pathogen multiplication. Methods of determining pathogen resistance/tolerance are known to the person of skill in the art, such as visual scoring of pathogen infection or pathogen-induced damage, determination of biomass (yield), etc. As used herein, the terms “increased pathogen/virus/insect tolerance” and “increased pathogen/virus/insect resistance” may be used interchangeably with “reduced sensitivity” or “reduced susceptibility” towards pathogens, including viruses, such as BYDV, or insects, such as aphids. Accordingly, a plant, plant part, or plant population according to the invention which is more resistant or more tolerant towards a pathogen is considered less sensitive toward such pathogen. Less sensitive or less susceptible when used herein may be seen as “more tolerant” or “more resistant”. Similarly, “more tolerant” or “more resistant” may, vice versa, be seen as “less sensitive” or “less susceptible”. More sensitive or more susceptible when used herein may, vice versa, be seen as “less tolerant” or “less resistant”. Similarly, “less tolerant” or “less resistant” may, vice versa, be seen as “more sensitive” or “more susceptible”. According to the invention, (increased) resistance or tolerance is referred to as (increased) Barley Yellow Dwarf Virus (BYDV) resistance or tolerance and/or insect (in particular aphid) resistance or tolerance, as described herein elsewhere.

[0532] In certain embodiments, pathogen infestation is reduced. In certain embodiments, pathogen infestation is delayed. In certain embodiments, pathogen symptoms are reduced. In certain embodiments, pathogen symptoms are delayed. In certain embodiments, infestation and symptoms are reduced or delayed.

[0533] The plants, plant parts or plant populations as described herein having increased pathogen resistance or tolerance can be used to control pathogen infestation or infection. Accordingly, in an aspect, the invention relates to the use of such plants for controlling pathogen infestation or infection. Preferably pathogen infestation or infection is controlled by reduction of pathogen infestation or infection or as reduction in the symptoms of pathogen infestation or infection, at the plant, plant part, or plant population level, such as further described below.

[0534] In certain embodiments, an increased resistance or tolerance may present itself as a reduction of infection or infestation (e.g. the amount of pathogens (e.g., per plant area or per plant biomass), the multiplication (rate) or spread (rate)/distribution of pathogens, as well as the speed of pathogen spreading such as at a specific time during the (growth) season) at the (sub) plant level (such as for instance particular cells, organs, or tissues) or at the population level, such as a reduction of at least 5%, preferably at least 10%, such as at least 20%, at least 30%, at least 40%, at least 50%, at least 60%, at least 70%, at least 80%, at least 90%, or (about) 100%. At the population level, an increased resistance or tolerance may present itself as a reduction of infection or infestation as described above, but also for instance as a reduction in the amount of infected plants (or a combination), such as a reduction of at least 5%, preferably at least 10%, such as at least 20%, at least 30%, at least 40%, at least 50%, at least 60%, at least 70%, at least 80%, at least 90%, or (about) 100%. It will be understood that such reduction of infection or infestation can be relative to a reference plant (part) or population (such as a corresponding wild-type plant not according to the invention).

[0535] In certain embodiments, an increased resistance or tolerance may present itself as a reduction in the loss of biomass or yield in general or of a particular (harvestable) plant part (such as seed or fruit amount or weight) due to or as a consequence of pathogen infection. In certain embodiments, the resistant or tolerant plants exhibit a loss in biomass production (such as expressed in g/day or kg/ha or kg/ha/day, such as expressed as dry matter for instance expressed as weight percent) under pathogen infection which is at least 1%, preferably at least 2%, such as at least 3%, at least 4%, at least 5%, such as at least 10%, at least 15%, or at least 20% or more, lower than corresponding control plants, such as plants which are less resistant or tolerant, or plants not according to the invention as described herein. In certain embodiments, the resistant or tolerant plants exhibit biomass production (such as expressed in g/day or kg/ha or kg/ha/day, such as expressed as dry matter for instance expressed as weight percent) under pathogen infection which is at least 1%, preferably at least 2%, such as at least 3%, at least 4%, at least 5%, such as at least 10%, at least 15%, or at least 20% or more, higher than corresponding control plants, such as plants which are less resistant or tolerant, or plants not according to the invention as described herein.

[0536] As used herein, the term “yield potential” refers to maximum yield obtainable at harvest.

[0537] For the evaluation of (increased) resistance or tolerance, resistance or tolerance may be compared between a plant (or plant part) according to the present invention and a plant or plant part not according to the present invention, i.e., a plant (or plant part) not comprising the polynucleotide, QTL, locus, gene(s), molecular marker(s), SNP(s), or haplotype of the invention. Such plant (or plant part) may for instance be a reference plant (or plant part derived therefrom), such as for instance the reference Hordeum vulgare Morex as described herein elsewhere. Such plant may alternatively be a (near) isogenic line (otherwise (substantially) identical to the plant of the invention, apart from lacking the resistance polynucleotide, QTL, locus, gene(s), molecular marker(s), or SNP(s) of the invention). A comparison between a barley plant (or plant part) comprising the polynucleotide, QTL, locus, gene(s), molecular marker(s), SNP(s), or haplotype of the invention as described herein and a barley plant not comprising the polynucleotide, QTL, locus, gene(s), molecular marker(s), SNP(s), or haplotype of the invention e.g., comprising the Hordeum vulgare Morex reference genome is preferably performed under similar greenhouse or field conditions and preferably with a controlled pathogen contact. Under said conditions the inventive barley plant is capable of showing less BYDV and/or insect infestation and less yield loss, as can be seen from the examples described herein. The skilled person will understand that when reference is made to a plant part in connection with BYDV and/or insect resistance, such is to be interpreted as a plant part comprising (or in the alternative lacking) the polynucleotide, QTL, locus, gene(s), molecular marker(s), SNP(s), or haplotype of the invention and wherein said plant part is derived from or can be used to generate a plant having BYDV and/or insect resistance (or in the alternative lacking BYDV and/or insect resistance)

[0538] By means of example, and without limitation, an increase of pathogen resistance or tolerance, in particular BYDV resistance/tolerance, can be evaluated based several criteria, such as (pathogenic) symptoms, which can for instance be classified according to the following scoring scheme (assessed as the proportion of leaves showing red to yellow discoloration): 0=no symptoms; 1=plants have a few (<20%) discolored leaves; 2, 3, 4, and 5 represent approximately 20, 40, 60%, and almost all (>60%) of leaves affected. An increased resistance or tolerance of the plants or plant parts of the invention, when infected, in certain embodiments entails a reduction of at least 1 point in the above scoring system, compared to plants or plant parts not according to the invention, i.e., plants or plant parts not comprising the polynucleotide, QTL, locus, gene(s), marker, and/or allele/haplotype of the invention. In certain embodiments, resistance or tolerance of the plants or plant parts of the invention, when infected, entails a maximum score in the above scoring system of 3, preferably 2, more preferably 1. In certain embodiments, an increased resistance or tolerance of the plants or plant parts of the invention, when infected, entails discoloured regions/lesions which have an (average) diameter which is at least 20%, preferably at least 50%, more preferably at least 80% smaller than diameter of plants not according to the invention. In certain embodiments, an increased resistance or tolerance of the plants or plant parts of the invention, when infected, entails a number of discoloured regions/lesions which is at least 20%, preferably at least 50%, more preferably at least 80% less than the diameter on plants not according to the invention. In certain embodiments, an increased resistance or tolerance of the plants or plant parts of the invention, when infected, entails discoloured regions/lesions which have an (average) diameter which is at least 20%, preferably at least 50%, more preferably at least 80% smaller than the diameter on plants not according to the invention, and a number of discoloured regions/lesions which is at least 20%, preferably at least 50%, more preferably at least 80% less than the diameter of plants not according to the invention. In certain embodiments, resistance or tolerance of the plants or plant parts of the invention, when infected, entails the absence of discoloured leaves or discoloured regions/lesions. The skilled person will understand that for the evaluation of disease burden, such as the number and/or diameter of discoloured leaves or regions/lesions, and in particular comparison of disease burden, plant at similar stages and conditions of infection are compared, e.g., plants of similar size and/or age, infected with similar amounts of pathogen, and/or evaluated at similar time frames after infection. In certain embodiments, an increased resistance or tolerance of the plants or plant parts of the invention, when infected, entails a delay in occurrence of dicolouration, such as a delay of at least 20% in time, preferably at least 50%, more preferably at least 80%, optionally also having reduced discoloured region/lesion diameter or amount as described above.

[0539] As used herein, “Barley Yellow Dwarf Virus” or “BYDV” refers to a group of closely related positive-sense RNA viral species. According to the International Committee on Taxonomy of Viruses (ICTV), BYDV species can be classified within the Luteovirus or Sobemovirus genus. BYDV strains differ serologically and in virulence, host range and vector specificity. BYDV is transmitted by more than 20 aphid species. BYDV strains include among others BYDV-MAV, BYDV-PAV, BYDV-RMV, BYDV-SGV, BYDV-PAS, BYDV-GPV, BYDV-DAV. Hosts for BYDV are aphids of the family of Aphididae. Hosts include aphids from the genus Sitobion (e.g. Sitobion avenae), Rhopalosiphum (e.g. Rhopalosiphum padi and Rhopalosiphum maidis), Schizaphis (e.g. Schizaphis graminum).

[0540] When reference is made herein to “insect” resistance, preferably the insect is an aphid, preferably from the family of Aphididae. In preferred embodiments, the aphid is from the genus Sitobion (e.g. Sitobion avenae), Rhopalosiphum (e.g. Rhopalosiphum padi and Rhopalosiphum maidis), Schizaphis (e.g. Schizaphis graminum).

[0541] In certain embodiments, molecular marker (allele) ge51829s01 is or comprises a SNP at a position corresponding to position 573789473 (on chromosome H3) of reference Hordeum vulgare genome Morex v3; or the complement or reverse complement thereof. In certain embodiments, molecular marker (allele) ge51829s01 comprises at least 15 nucleotides, preferably at least 18 nucleotides, more preferably at least 20 nucleotides, such as at least 50 nucleotides. In certain embodiments, molecular marker (allele) ge51829s01 comprises at least 15 nucleotides, preferably at least 18 nucleotides, more preferably at least 20 nucleotides, such as at least 50 nucleotides including said SNP and contiguous 5′, 3′, or combined 5′ and 3′ nucleotides.

[0542] In certain embodiments, molecular marker (allele) ge51835s01 is or comprises a SNP at a position corresponding to position 577673982 (on chromosome H3) of reference Hordeum vulgare genome Morex v3; or the complement or reverse complement thereof. In certain embodiments, molecular marker (allele) ge51835s01 comprises at least 15 nucleotides, preferably at least 18 nucleotides, more preferably at least 20 nucleotides, such as at least 50 nucleotides. In certain embodiments, molecular marker (allele) ge51835s01 comprises at least 15 nucleotides, preferably at least 18 nucleotides, more preferably at least 20 nucleotides, such as at least 50 nucleotides including said SNP and contiguous 5′, 3′, or combined 5′ and 3′ nucleotides.

[0543] In certain embodiments, molecular marker (allele) ge45688s01 is or comprises a SNP at a position corresponding to position 591505046 (on chromosome H3) of reference Hordeum vulgare genome Morex v3; or the complement or reverse complement thereof. In certain embodiments, molecular marker (allele) ge45688s01 comprises at least 15 nucleotides, preferably at least 18 nucleotides, more preferably at least 20 nucleotides, such as at least 50 nucleotides. In certain embodiments, molecular marker (allele) ge45688s01 comprises at least 15 nucleotides, preferably at least 18 nucleotides, more preferably at least 20 nucleotides, such as at least 50 nucleotides including said SNP and contiguous 5′, 3′, or combined 5′ and 3′ nucleotides.

[0544] In certain embodiments, molecular marker (allele) ge45691s01 is or comprises a SNP at a position corresponding to position 592578134 (on chromosome H3) of reference Hordeum vulgare genome Morex v3; or the complement or reverse complement thereof. In certain embodiments, molecular marker (allele) ge45691s01 comprises at least 15 nucleotides, preferably at least 18 nucleotides, more preferably at least 20 nucleotides, such as at least 50 nucleotides. In certain embodiments, molecular marker (allele) ge45691s01 comprises at least 15 nucleotides, preferably at least 18 nucleotides, more preferably at least 20 nucleotides, such as at least 50 nucleotides including said SNP and contiguous 5′, 3′, or combined 5′ and 3′ nucleotides.

[0545] In certain embodiments, molecular marker (allele) ge45717s01 is or comprises a SNP at a position corresponding to position 592685940 (on chromosome H3) of reference Hordeum vulgare genome Morex v3; or the complement or reverse complement thereof. In certain embodiments, molecular marker (allele) ge45717s01 comprises at least 15 nucleotides, preferably at least 18 nucleotides, more preferably at least 20 nucleotides, such as at least 50 nucleotides. In certain embodiments, molecular marker (allele) ge45717s01 comprises at least 15 nucleotides, preferably at least 18 nucleotides, more preferably at least 20 nucleotides, such as at least 50 nucleotides including said SNP and contiguous 5′, 3′, or combined 5′ and 3′ nucleotides.

[0546] In certain embodiments, molecular marker (allele) ge45718s01 is or comprises a SNP at a position corresponding to position 592752433 (on chromosome H3) of reference Hordeum vulgare genome Morex v3; or the complement or reverse complement thereof. In certain embodiments, molecular marker (allele) ge45718s01 comprises at least 15 nucleotides, preferably at least 18 nucleotides, more preferably at least 20 nucleotides, such as at least 50 nucleotides. In certain embodiments, molecular marker (allele) ge45718s01 comprises at least 15 nucleotides, preferably at least 18 nucleotides, more preferably at least 20 nucleotides, such as at least 50 nucleotides including said SNP and contiguous 5′, 3′, or combined 5′ and 3′ nucleotides.

[0547] In certain embodiments, molecular marker (allele) ge45719s01 is or comprises a SNP at a position corresponding to position 592849403 (on chromosome H3) of reference Hordeum vulgare genome Morex v3; or the complement or reverse complement thereof. In certain embodiments, molecular marker (allele) ge45719s01 comprises at least 15 nucleotides, preferably at least 18 nucleotides, more preferably at least 20 nucleotides, such as at least 50 nucleotides. In certain embodiments, molecular marker (allele) ge45719s01 comprises at least 15 nucleotides, preferably at least 18 nucleotides, more preferably at least 20 nucleotides, such as at least 50 nucleotides including said SNP and contiguous 5′, 3′, or combined 5′ and 3′ nucleotides.

[0548] In certain embodiments, molecular marker (allele) ge51829s01 is or comprises a SNP at a position corresponding to position 101 of SEQ ID NO: 3 or a sequence which is at least 90% identical, preferably at least 95% identical, more preferably at least 98% identical, most preferably identical to SEQ ID NO: 3 (and comprising said SNP); or the complement or reverse complement of any thereof. In certain embodiments, molecular marker (allele) ge51829s01 comprises at least 15 contiguous nucleotides of SEQ ID NO: 3 or a sequence which is at least 90% identical, preferably at least 95% identical, more preferably at least 98% identical, most preferably identical to SEQ ID NO: 3 (and comprising said SNP); or the complement or reverse complement of any thereof, preferably at least 18 nucleotides, more preferably at least 20 nucleotides, such as at least 50 nucleotides. In certain embodiments, molecular marker (allele) ge51829s01 comprises at least 15 contiguous nucleotides of SEQ ID NO: 3 or a sequence which is at least 90% identical, preferably at least 95% identical, more preferably at least 98% identical, most preferably identical to SEQ ID NO: 3 (and comprising said SNP); or the complement or reverse complement of any thereof, preferably at least 18 nucleotides, more preferably at least 20 nucleotides, such as at least 50 nucleotides including said SNP and contiguous 5′, 3′, or combined 5′ and 3′ nucleotides.

[0549] In certain embodiments, molecular marker (allele) ge51835s01 is or comprises a SNP at a position corresponding to position 101 of SEQ ID NO: 4 or a sequence which is at least 90% identical, preferably at least 95% identical, more preferably at least 98% identical, most preferably identical to SEQ ID NO: 4 (and comprising said SNP); or the complement or reverse complement of any thereof. In certain embodiments, molecular marker (allele) ge51835s01 comprises at least 15 contiguous nucleotides of SEQ ID NO: 4 or a sequence which is at least 90% identical, preferably at least 95% identical, more preferably at least 98% identical, most preferably identical to SEQ ID NO: 4 (and comprising said SNP); or the complement or reverse complement of any thereof, preferably at least 18 nucleotides, more preferably at least 20 nucleotides, such as at least 50 nucleotides. In certain embodiments, molecular marker (allele) ge51835s01 comprises at least 15 contiguous nucleotides of SEQ ID NO: 4 or a sequence which is at least 90% identical, preferably at least 95% identical, more preferably at least 98% identical, most preferably identical to SEQ ID NO: 4 (and comprising said SNP); or the complement or reverse complement of any thereof, preferably at least 18 nucleotides, more preferably at least 20 nucleotides, such as at least 50 nucleotides including said SNP and contiguous 5′, 3′, or combined 5′ and 3′ nucleotides.

[0550] In certain embodiments, molecular marker (allele) ge45688s01 is or comprises a SNP at a position corresponding to position 101 of SEQ ID NO: 5 or a sequence which is at least 90% identical, preferably at least 95% identical, more preferably at least 98% identical, most preferably identical to SEQ ID NO: 5 (and comprising said SNP); or the complement or reverse complement of any thereof. In certain embodiments, molecular marker (allele) ge45688s01 comprises at least 15 contiguous nucleotides of SEQ ID NO: 5 or a sequence which is at least 90% identical, preferably at least 95% identical, more preferably at least 98% identical, most preferably identical to SEQ ID NO: 5 (and comprising said SNP); or the complement or reverse complement of any thereof, preferably at least 18 nucleotides, more preferably at least 20 nucleotides, such as at least 50 nucleotides. In certain embodiments, molecular marker (allele) ge45688s01 comprises at least 15 contiguous nucleotides of SEQ ID NO: 5 or a sequence which is at least 90% identical, preferably at least 95% identical, more preferably at least 98% identical, most preferably identical to SEQ ID NO: 5 (and comprising said SNP); or the complement or reverse complement of any thereof, preferably at least 18 nucleotides, more preferably at least 20 nucleotides, such as at least 50 nucleotides including said SNP and contiguous 5′, 3′, or combined 5′ and 3′ nucleotides.

[0551] In certain embodiments, molecular marker (allele) ge45691s01 is or comprises a SNP at a position corresponding to position 101 of SEQ ID NO: 6 or a sequence which is at least 90% identical, preferably at least 95% identical, more preferably at least 98% identical, most preferably identical to SEQ ID NO: 6 (and comprising said SNP); or the complement or reverse complement of any thereof. In certain embodiments, molecular marker (allele) ge45691s01 comprises at least 15 contiguous nucleotides of SEQ ID NO: 6 or a sequence which is at least 90% identical, preferably at least 95% identical, more preferably at least 98% identical, most preferably identical to SEQ ID NO: 6 (and comprising said SNP); or the complement or reverse complement of any thereof, preferably at least 18 nucleotides, more preferably at least 20 nucleotides, such as at least 50 nucleotides. In certain embodiments, molecular marker (allele) ge45691s01 comprises at least 15 contiguous nucleotides of SEQ ID NO: 6 or a sequence which is at least 90% identical, preferably at least 95% identical, more preferably at least 98% identical, most preferably identical to SEQ ID NO: 6 (and comprising said SNP); or the complement or reverse complement of any thereof, preferably at least 18 nucleotides, more preferably at least 20 nucleotides, such as at least 50 nucleotides including said SNP and contiguous 5′, 3′, or combined 5′ and 3′ nucleotides.

[0552] In certain embodiments, molecular marker (allele) ge45717s01 is or comprises a SNP at a position corresponding to position 56 of SEQ ID NO: 7 or a sequence which is at least 90% identical, preferably at least 95% identical, more preferably at least 98% identical, most preferably identical to SEQ ID NO: 7 (and comprising said SNP); or the complement or reverse complement of any thereof. In certain embodiments, molecular marker (allele) ge45717s01 comprises at least 15 contiguous nucleotides of SEQ ID NO: 7 or a sequence which is at least 90% identical, preferably at least 95% identical, more preferably at least 98% identical, most preferably identical to SEQ ID NO: 7 (and comprising said SNP); or the complement or reverse complement of any thereof, preferably at least 18 nucleotides, more preferably at least 20 nucleotides, such as at least 50 nucleotides. In certain embodiments, molecular marker (allele) ge45717s01 comprises at least 15 contiguous nucleotides of SEQ ID NO: 7 or a sequence which is at least 90% identical, preferably at least 95% identical, more preferably at least 98% identical, most preferably identical to SEQ ID NO: 7 (and comprising said SNP); or the complement or reverse complement of any thereof, preferably at least 18 nucleotides, more preferably at least 20 nucleotides, such as at least 50 nucleotides including said SNP and contiguous 5′, 3′, or combined 5′ and 3′ nucleotides.

[0553] In certain embodiments, molecular marker (allele) ge45718s01 is or comprises a SNP at a position corresponding to position 57 of SEQ ID NO: 8 or a sequence which is at least 90% identical, preferably at least 95% identical, more preferably at least 98% identical, most preferably identical to SEQ ID NO: 8 (and comprising said SNP); or the complement or reverse complement of any thereof. In certain embodiments, molecular marker (allele) ge45718s01 comprises at least 15 contiguous nucleotides of SEQ ID NO: 8 or a sequence which is at least 90% identical, preferably at least 95% identical, more preferably at least 98% identical, most preferably identical to SEQ ID NO: 8 (and comprising said SNP); or the complement or reverse complement of any thereof, preferably at least 18 nucleotides, more preferably at least 20 nucleotides, such as at least 50 nucleotides. In certain embodiments, molecular marker (allele) ge45718s01 comprises at least 15 contiguous nucleotides of SEQ ID NO: 8 or a sequence which is at least 90% identical, preferably at least 95% identical, more preferably at least 98% identical, most preferably identical to SEQ ID NO: 8 (and comprising said SNP); or the complement or reverse complement of any thereof, preferably at least 18 nucleotides, more preferably at least 20 nucleotides, such as at least 50 nucleotides including said SNP and contiguous 5′, 3′, or combined 5′ and 3′ nucleotides.

[0554] In certain embodiments, molecular marker (allele) ge45719s01 is or comprises a SNP at a position corresponding to position 51 of SEQ ID NO: 9 or a sequence which is at least 90% identical, preferably at least 95% identical, more preferably at least 98% identical, most preferably identical to SEQ ID NO: 9 (and comprising said SNP); or the complement or reverse complement of any thereof. In certain embodiments, molecular marker (allele) ge45719s01 comprises at least 15 contiguous nucleotides of SEQ ID NO: 9 or a sequence which is at least 90% identical, preferably at least 95% identical, more preferably at least 98% identical, most preferably identical to SEQ ID NO: 9 (and comprising said SNP); or the complement or reverse complement of any thereof, preferably at least 18 nucleotides, more preferably at least 20 nucleotides, such as at least 50 nucleotides. In certain embodiments, molecular marker (allele) ge45719s01 comprises at least 15 contiguous nucleotides of SEQ ID NO: 9 or a sequence which is at least 90% identical, preferably at least 95% identical, more preferably at least 98% identical, most preferably identical to SEQ ID NO: 9 (and comprising said SNP); or the complement or reverse complement of any thereof, preferably at least 18 nucleotides, more preferably at least 20 nucleotides, such as at least 50 nucleotides including said SNP and contiguous 5′, 3′, or combined 5′ and 3′ nucleotides.

[0555] In certain embodiments, molecular marker (allele) ge51829s01 comprises a sequence as set forth in SEQ ID NO: 3. In certain embodiments, molecular marker (allele) ge51829s01 is comprised in a sequence as set forth in SEQ ID NO: 3 (and comprises the SNP at the indicated position). In certain embodiments, molecular marker (allele) ge51829s01 is detectable with a polynucleic acid as set forth in SEQ ID NO: 3.

[0556] In certain embodiments, molecular marker (allele) ge51835s01 comprises a sequence as set forth in SEQ ID NO: 4. In certain embodiments, molecular marker (allele) ge51835s01 is comprised in a sequence as set forth in SEQ ID NO: 4 (and comprises the SNP at the indicated position). In certain embodiments, molecular marker (allele) ge51835s01 is detectable with a polynucleic acid as set forth in SEQ ID NO: 4.

[0557] In certain embodiments, molecular marker (allele) ge45688s01 comprises a sequence as set forth in SEQ ID NO: 5. In certain embodiments, molecular marker (allele) ge45688s01 is comprised in a sequence as set forth in SEQ ID NO: 5 (and comprises the SNP at the indicated position). In certain embodiments, molecular marker (allele) ge45688s01 is detectable with a polynucleic acid as set forth in SEQ ID NO: 5.

[0558] In certain embodiments, molecular marker (allele) ge45691s01 comprises a sequence as set forth in SEQ ID NO: 6. In certain embodiments, molecular marker (allele) ge45691s01 is comprised in a sequence as set forth in SEQ ID NO: 6 (and comprises the SNP at the indicated position). In certain embodiments, molecular marker (allele) ge45691s01 is detectable with a polynucleic acid as set forth in SEQ ID NO: 6.

[0559] In certain embodiments, molecular marker (allele) ge45717s01 comprises a sequence as set forth in SEQ ID NO: 7. In certain embodiments, molecular marker (allele) ge45717s01 is comprised in a sequence as set forth in SEQ ID NO: 7 (and comprises the SNP at the indicated position). In certain embodiments, molecular marker (allele) ge45717s01 is detectable with a polynucleic acid as set forth in SEQ ID NO: 7.

[0560] In certain embodiments, molecular marker (allele) ge45718s01 comprises a sequence as set forth in SEQ ID NO: 8. In certain embodiments, molecular marker (allele) ge45718s01 is comprised in a sequence as set forth in SEQ ID NO: 8 (and comprises the SNP at the indicated position). In certain embodiments, molecular marker (allele) ge45718s01 is detectable with a polynucleic acid as set forth in SEQ ID NO: 8.

[0561] In certain embodiments, molecular marker (allele) ge45719s01 comprises a sequence as set forth in SEQ ID NO: 9. In certain embodiments, molecular marker (allele) ge45719s01 is comprised in a sequence as set forth in SEQ ID NO: 9 (and comprises the SNP at the indicated position). In certain embodiments, molecular marker (allele) ge45719s01 is detectable with a polynucleic acid as set forth in SEQ ID NO: 9.

[0562] In certain embodiments, the molecular markers according to the invention are SNPs. In certain embodiments, the molecular markers according to the invention comprise at least 15 nucleotides, preferably at least 20 nucleotides. In certain embodiments, the molecular markers according to the invention comprise at least 50 nucleotides. In certain embodiments, the molecular markers according to the invention comprise at most 200 nucleotides. In certain embodiments, the molecular markers according to the invention comprise at most 100 nucleotides. In certain embodiments, the molecular markers according to the invention comprise at least 15 nucleotides, preferably at least 20 nucleotides and at most 200 nucleotides. In certain embodiments, the molecular markers according to the invention comprise at least 50 nucleotides and at most 200 nucleotides. In certain embodiments, the molecular markers according to the invention comprise at least 20 nucleotides and at most 100 nucleotides. In certain embodiments, the molecular markers according to the invention comprise at least 50 nucleotides and at most 100 nucleotides.

[0563] It will be understood that when reference is made herein to a (polynucleic acid) sequence comprised in a polynucleic acid sequence, that a fragment thereof is referred to, i.e., a contiguous stretch of nucleotides.

[0564] The identity of the SNP as referred to herein differs between the donor allele and the acceptor allele, i.e., differs between the BYDV and/or insect resistance allele and the susceptible allele. Hence the identity of the SNP, and by extension the molecular markers of the invention as described herein, is capable of distinguishing or discriminating between resistance and susceptibility. Likewise, the identity of the SNP, and by extension the molecular markers of the invention as described herein, is capable of identifying BYDV and/or insect resistance or is capable of identifying BYDV and/or insect susceptibility.

[0565] The skilled person will understand that detecting any of the (molecular) marker (allele) or SNP (allele) as described herein may equivalently detect any of the other (molecular) marker (allele) or SNP (allele), given their close linkage. For example, screening for a polynucleotide comprising ge45717s01 and ge45718s01 may be done by screening for these marker (allele) themselves, or alternatively by screening for any of the other marker (allele) of the invention as described herein elsewhere.

[0566] The identity of molecular markers of the invention is provided in Table 3. Marker allele and SNP allele sequences associated with the resistance allele or alternatively the susceptible alleles are indicated. The respective SNP allele identities for the resistance allele and susceptible allele can be extracted from Table 1. The skilled person will understand that these SPN allele identities apply to the recited genomic positions on the Morex v3 reference genome as well as the indicated SEQ ID NOs, as described herein elsewhere.

[0567] Suitable preferred markers and SNP identities according to an embodiment of the invention are provided in Table 1 below.

TABLE 1

| | SNP position | | | | |
|---|---|---|---|---|---|
| | | Position on | | Non-resistant/ | |
| | Position on | chromosome | Resistant | susceptible | |
| | indicated | H03 of | SNP | SNP identity | |
| Marker | SEQ ID NO | Morex v3 | identity | Generic | Specific |
| ge51829s01 | 101 of SEQ | 573789473 | G | H | A |
| | ID NO: 3 | | | | |
| ge51835s01 | 101 of SEQ | 577673982 | C | D | G |
| | ID NO: 4 | | | | |
| ge45688s01 | 101 of SEQ | 591505046 | G | H | T |
| | ID NO: 5 | | | | |
| ge45691s01 | 101 of SEQ | 592578134 | A | B | G |
| | ID NO: 6 | | | | |
| ge45717s01 | 56 of SEQ | 592685940 | C | D | T |
| | ID NO: 7 | | | | |
| ge45718s01 | 57 of SEQ | 592752433 | T | V | G |
| | ID NO: 8 | | | | |
| ge45719s01 | 51 of SEQ | 592849403 | T | V | C |
| | ID NO: 9 | | | | |

[0568] Suitable SNP haplotypes (i.e. SNP combinations conferring BYDV and/or insect resistance) according to an embodiment of the invention are provided in Table 2.

[0569] A plant or plant part is identified as resistant to or having increased resistance to BYDV or insects if one or more of the “resistant” SNP alleles or haplotypes are identified or detected.

[0570] A plant or plant part is identified as not resistant to/susceptible for or not having increased resistance to BYDV or insects if one or more of the “resistant” SNP alleles or haplotypes are not identified or detected.

[0571] A plant or plant part is identified as not resistant to/susceptible for or not having increased resistance to BYDV or insects if one or more of the “non-resistant/susceptible” SNP alleles is identified or detected or if one of the “resistant” haplotypes is not identified or detected or if the resistance haplotype is not identified or detected.

[0572] In certain embodiments, the (increased) resistance allele of molecular marker ge51829s01 comprises a SNP at position 101 of SEQ ID NO: 3 or a sequence which is at least 90% identical, preferably at least 95% identical, more preferably at least 98% identical, most preferably identical to SEQ ID NO: 3, or at a position corresponding to position 573789473 of (on chromosome H3) of reference genome Morex v3; wherein said SNP is G. In certain embodiments, the non-(increased) resistance or susceptible allele of molecular marker ge51829s01 comprises a SNP at position 101 of SEQ ID NO: 3 or a sequence which is at least 90% identical, preferably at least 95% identical, more preferably at least 98% identical, most preferably identical to SEQ ID NO: 3, or at a position corresponding to position 573789473 of (on chromosome H3) of reference genome Morex v3; wherein said SNP is not G. In certain embodiments, the non-(increased) resistance or susceptible allele of molecular marker ge51829s01 comprises a SNP at position 101 of SEQ ID NO: 3 or a sequence which is at least 90% identical, preferably at least 95% identical, more preferably at least 98% identical, most preferably identical to SEQ ID NO: 3, or at a position corresponding to position 573789473 of (on chromosome H3) of reference genome Morex v3; wherein said SNP is H. In certain embodiments, the non-(increased) resistance or susceptible allele of molecular marker ge51829s01 comprises a SNP at position 101 of SEQ ID NO: 3 or a sequence which is at least 90% identical, preferably at least 95% identical, more preferably at least 98% identical, most preferably identical to SEQ ID NO: 3, or at a position corresponding to position 573789473 of (on chromosome H3) of reference genome Morex v3; wherein said SNP is A.

[0573] In certain embodiments, the (increased) resistance allele of molecular marker ge51835s01 comprises a SNP at position 101 of SEQ ID NO: 4 or a sequence which is at least 90% identical, preferably at least 95% identical, more preferably at least 98% identical, most preferably identical to SEQ ID NO: 4, or at a position corresponding to position 577673982 of (on chromosome H3) of reference genome Morex v3; wherein said SNP is C. In certain embodiments, the non-(increased) resistance or susceptible allele of molecular marker ge51835s01 comprises a SNP at position 101 of SEQ ID NO: 4 or a sequence which is at least 90% identical, preferably at least 95% identical, more preferably at least 98% identical, most preferably identical to SEQ ID NO: 4, or at a position corresponding to position 577673982 of (on chromosome H3) of reference genome Morex v3; wherein said SNP is not C. In certain embodiments, the non-(increased) resistance or susceptible allele of molecular marker ge51835s01 comprises a SNP at position 101 of SEQ ID NO: 4 or a sequence which is at least 90% identical, preferably at least 95% identical, more preferably at least 98% identical, most preferably identical to SEQ ID NO: 4, or at a position corresponding to position 577673982 of (on chromosome H3) of reference genome Morex v3; wherein said SNP is D. In certain embodiments, the non-(increased) resistance or susceptible allele of molecular marker ge51835s01 comprises a SNP at position 101 of SEQ ID NO: 4 or a sequence which is at least 90% identical, preferably at least 95% identical, more preferably at least 98% identical, most preferably identical to SEQ ID NO: 4, or at a position corresponding to position 577673982 of (on chromosome H3) of reference genome Morex v3; wherein said SNP is G.

[0574] In certain embodiments, the (increased) resistance allele of molecular marker ge45688s01 comprises a SNP at position 101 of SEQ ID NO: 5 or a sequence which is at least 90% identical, preferably at least 95% identical, more preferably at least 98% identical, most preferably identical to SEQ ID NO: 5, or at a position corresponding to position 591505046 of (on chromosome H3) of reference genome Morex v3; wherein said SNP is G. In certain embodiments, the non-(increased) resistance or susceptible allele of molecular marker ge45688s01 comprises a SNP at position 101 of SEQ ID NO: 5 or a sequence which is at least 90% identical, preferably at least 95% identical, more preferably at least 98% identical, most preferably identical to SEQ ID NO: 5, or at a position corresponding to position 591505046 of (on chromosome H3) of reference genome Morex v3; wherein said SNP is not G. In certain embodiments, the non-(increased) resistance or susceptible allele of molecular marker ge45688s01 comprises a SNP at position 101 of SEQ ID NO: 5 or a sequence which is at least 90% identical, preferably at least 95% identical, more preferably at least 98% identical, most preferably identical to SEQ ID NO: 5, or at a position corresponding to position 591505046 of (on chromosome H3) of reference genome Morex v3; wherein said SNP is H. In certain embodiments, the non-(increased) resistance or susceptible allele of molecular marker ge45688s01 comprises a SNP at position 101 of SEQ ID NO: 5 or a sequence which is at least 90% identical, preferably at least 95% identical, more preferably at least 98% identical, most preferably identical to SEQ ID NO: 5, or at a position corresponding to position 591505046 of (on chromosome H3) of reference genome Morex v3; wherein said SNP is T.

[0575] In certain embodiments, the (increased) resistance allele of molecular marker ge45691s01 comprises a SNP at position 101 of SEQ ID NO: 6 or a sequence which is at least 90% identical, preferably at least 95% identical, more preferably at least 98% identical, most preferably identical to SEQ ID NO: 6, or at a position corresponding to position 592578134 of (on chromosome H3) of reference genome Morex v3; wherein said SNP is A. In certain embodiments, the non-(increased) resistance or susceptible allele of molecular marker ge45691s01 comprises a SNP at position 101 of SEQ ID NO: 6 or a sequence which is at least 90% identical, preferably at least 95% identical, more preferably at least 98% identical, most preferably identical to SEQ ID NO: 6, or at a position corresponding to position 592578134 of (on chromosome H3) of reference genome Morex v3; wherein said SNP is not A. In certain embodiments, the non-(increased) resistance or susceptible allele of molecular marker ge45691s01 comprises a SNP at position 101 of SEQ ID NO: 6 or a sequence which is at least 90% identical, preferably at least 95% identical, more preferably at least 98% identical, most preferably identical to SEQ ID NO: 6, or at a position corresponding to position 592578134 of (on chromosome H3) of reference genome Morex v3; wherein said SNP is B. In certain embodiments, the non-(increased) resistance or susceptible allele of molecular marker ge45691s01 comprises a SNP at position 101 of SEQ ID NO: 6 or a sequence which is at least 90% identical, preferably at least 95% identical, more preferably at least 98% identical, most preferably identical to SEQ ID NO: 6, or at a position corresponding to position 592578134 of (on chromosome H3) of reference genome Morex v3; wherein said SNP is G.

[0576] In certain embodiments, the (increased) resistance allele of molecular marker ge45717s01 comprises a SNP at position 101 of SEQ ID NO: 7 or a sequence which is at least 90% identical, preferably at least 95% identical, more preferably at least 98% identical, most preferably identical to SEQ ID NO: 7, or at a position corresponding to position 592685940 of (on chromosome H3) of reference genome Morex v3; wherein said SNP is C. In certain embodiments, the non-(increased) resistance or susceptible allele of molecular marker ge45717s01 comprises a SNP at position 101 of SEQ ID NO: 7 or a sequence which is at least 90% identical, preferably at least 95% identical, more preferably at least 98% identical, most preferably identical to SEQ ID NO: 7, or at a position corresponding to position 592685940 of (on chromosome H3) of reference genome Morex v3; wherein said SNP is not C. In certain embodiments, the non-(increased) resistance or susceptible allele of molecular marker ge45717s01 comprises a SNP at position 101 of SEQ ID NO: 7 or a sequence which is at least 90% identical, preferably at least 95% identical, more preferably at least 98% identical, most preferably identical to SEQ ID NO: 7, or at a position corresponding to position 592685940 of (on chromosome H3) of reference genome Morex v3; wherein said SNP is D. In certain embodiments, the non-(increased) resistance or susceptible allele of molecular marker ge45717s01 comprises a SNP at position 101 of SEQ ID NO: 7 or a sequence which is at least 90% identical, preferably at least 95% identical, more preferably at least 98% identical, most preferably identical to SEQ ID NO: 7, or at a position corresponding to position 592685940 of (on chromosome H3) of reference genome Morex v3; wherein said SNP is T.

[0577] In certain embodiments, the (increased) resistance allele of molecular marker ge45718s01 comprises a SNP at position 101 of SEQ ID NO: 8 or a sequence which is at least 90% identical, preferably at least 95% identical, more preferably at least 98% identical, most preferably identical to SEQ ID NO: 8, or at a position corresponding to position 592752433 of (on chromosome H3) of reference genome Morex v3; wherein said SNP is T. In certain embodiments, the non-(increased) resistance or susceptible allele of molecular marker ge45718s01 comprises a SNP at position 101 of SEQ ID NO: 8 or a sequence which is at least 90% identical, preferably at least 95% identical, more preferably at least 98% identical, most preferably identical to SEQ ID NO: 8, or at a position corresponding to position 592752433 of (on chromosome H3) of reference genome Morex v3; wherein said SNP is not T. In certain embodiments, the non-(increased) resistance or susceptible allele of molecular marker ge45718s01 comprises a SNP at position 101 of SEQ ID NO: 8 or a sequence which is at least 90% identical, preferably at least 95% identical, more preferably at least 98% identical, most preferably identical to SEQ ID NO: 8, or at a position corresponding to position 592752433 of (on chromosome H3) of reference genome Morex v3; wherein said SNP is V. In certain embodiments, the non-(increased) resistance or susceptible allele of molecular marker ge45718s01 comprises a SNP at position 101 of SEQ ID NO: 8 or a sequence which is at least 90% identical, preferably at least 95% identical, more preferably at least 98% identical, most preferably identical to SEQ ID NO: 8, or at a position corresponding to position 592752433 of (on chromosome H3) of reference genome Morex v3; wherein said SNP is G.

[0578] In certain embodiments, the (increased) resistance allele of molecular marker ge45719s01 comprises a SNP at position 101 of SEQ ID NO: 9 or a sequence which is at least 90% identical, preferably at least 95% identical, more preferably at least 98% identical, most preferably identical to SEQ ID NO: 9, or at a position corresponding to position 592849403 of (on chromosome H3) of reference genome Morex v3; wherein said SNP is T. In certain embodiments, the non-(increased) resistance or susceptible allele of molecular marker ge45719s01 comprises a SNP at position 101 of SEQ ID NO: 9 or a sequence which is at least 90% identical, preferably at least 95% identical, more preferably at least 98% identical, most preferably identical to SEQ ID NO: 9, or at a position corresponding to position 592849403 of (on chromosome H3) of reference genome Morex v3; wherein said SNP is not T. In certain embodiments, the non-(increased) resistance or susceptible allele of molecular marker ge45719s01 comprises a SNP at position 101 of SEQ ID NO: 9 or a sequence which is at least 90% identical, preferably at least 95% identical, more preferably at least 98% identical, most preferably identical to SEQ ID NO: 9, or at a position corresponding to position 592849403 of (on chromosome H3) of reference genome Morex v3; wherein said SNP is V. In certain embodiments, the non-(increased) resistance or susceptible allele of molecular marker ge45719s01 comprises a SNP at position 101 of SEQ ID NO: 9 or a sequence which is at least 90% identical, preferably at least 95% identical, more preferably at least 98% identical, most preferably identical to SEQ ID NO: 9, or at a position corresponding to position 592849403 of (on chromosome H3) of reference genome Morex v3; wherein said SNP is C.

[0579] In certain embodiments, the methods for identifying or selecting a barley plant or plant part as described herein according to the invention are methods for identifying or selecting a plant or plant part having (increased) BYDV and/or insect resistance and/or tolerance, such as in comparison to a barley plant or plant part not having said polynucleotide, molecular marker (allele), (resistance) locus (allele), QTL (allele), gene (allele), or SNP (allele) of the invention. In certain embodiments, the methods for identifying or selecting a barley plant or plant part as described herein according to the invention are methods for identifying or selecting a plant or plant part having (increased) BYDV resistance and/or tolerance, such as in comparison to a barley plant or plant part not having said polynucleotide, molecular marker (allele), (resistance) locus (allele), QTL (allele), gene (allele), or SNP (allele) of the invention. In certain embodiments, the methods for identifying or selecting a barley plant or plant part as described herein according to the invention are methods for identifying or selecting a plant or plant part having (increased) insect resistance and/or tolerance, such as in comparison to a barley plant or plant part not having said polynucleotide, molecular marker (allele), (resistance) locus (allele), QTL (allele), gene (allele), or SNP (allele) of the invention. In certain embodiments, the methods for identifying or selecting a barley plant or plant part as described herein according to the invention are methods for identifying or selecting a plant or plant part having (increased) aphid, such as aphid genera or species as described herein elsewhere, resistance and/or tolerance, such as in comparison to a barley plant or plant part not having said polynucleotide, molecular marker (allele), (resistance) locus (allele), QTL (allele), gene (allele), or SNP (allele) of the invention. The plant or plant part is identified as such if the corresponding “resistant” QTL (allele), polynucleotide (allele), locus (allele), marker (allele), gene (allele), or SNP (allele) or haplotype is identified or detected, as described herein elsewhere.

[0580] In certain embodiments, the methods for identifying or selecting a barley plant or plant part as described herein according to the invention are methods for identifying or selecting a plant or plant part not having (increased) BYDV and/or insect resistance and/or tolerance, such as in comparison to a barley plant or plant part not having said polynucleotide, molecular marker (allele), (resistance) locus (allele), QTL (allele), gene (allele), or SNP (allele) of the invention. In certain embodiments, the methods for identifying or selecting a barley plant or plant part as described herein according to the invention are methods for identifying or selecting a plant or plant part not having (increased) BYDV resistance and/or tolerance, such as in comparison to a barley plant or plant part not having said polynucleotide, molecular marker (allele), (resistance) locus (allele), QTL (allele), gene (allele), or SNP (allele) of the invention. In certain embodiments, the methods for identifying or selecting a barley plant or plant part as described herein according to the invention are methods for identifying or selecting a plant or plant part not having (increased) insect resistance and/or tolerance, such as in comparison to a barley plant or plant part not having said polynucleotide, molecular marker (allele), (resistance) locus (allele), QTL (allele), gene (allele), or SNP (allele) of the invention. In certain embodiments, the methods for identifying or selecting a barley plant or plant part as described herein according to the invention are methods for identifying or selecting a plant or plant part not having (increased) aphid, such as aphid genera or species as described herein elsewhere, resistance and/or tolerance, such as in comparison to a barley plant or plant part not having said polynucleotide, molecular marker (allele), (resistance) locus (allele), QTL (allele), gene (allele), or SNP (allele) of the invention. The plant or plant part is identified as such if the corresponding “non-resistant” QTL (allele), polynucleotide (allele), locus (allele), marker (allele), gene (allele), or SNP (allele), or haplotype is identified or detected, as described herein elsewhere.

[0581] In certain embodiments, the (resistance) locus, QTL, gene(s), molecular marker(s), polynucleotide, or SNP(s) of the invention are located on chromosome 3H, preferably chromosome 3HL

[0582] In certain embodiments, the methods for identifying or selecting a barley plant or plant part as described herein according to the invention are methods for distinguishing or discriminating between a plant or plant part having (increased) BYDV and/or insect resistance and/or tolerance and a plant or plant part not having (increased) BYDV and/or insect resistance and/or tolerance, such as in comparison to a barley plant or plant part not having said polynucleotide, molecular marker (allele), gene (allele), locus (allele), QTL (allele), or SNP (allele) of the invention.

[0583] It will be understood that in the context of plant parts, whether or not such plant part is identified or selected as having (increased) resistance or tolerance relates to resistance/tolerance of the plant from which the plant part is isolated or derived, or alternatively relates to a plant generated from or resulting from such plant part.

[0584] In an aspect, the invention relates to a plant or plant part identified and/or selected according to the methods for identifying and/or selecting plants or plant parts according to the invention as described herein.

[0585] In certain embodiments, in the plants or plant parts according to the invention as described herein, the QTL (allele), polynucleotide (allele), gene (allele) locus (allele), marker (allele), or SNP (allele) is homozygous.

[0586] In certain embodiments, in the plants or plant parts according to the invention as described herein, the QTL allele, polynucleotide allele, locus allele, gene allele, marker allele, or SNP allele is homozygous.

[0587] In certain embodiments, in the plants or plant parts according to the invention as described herein, the QTL (allele), polynucleotide (allele), locus (allele), gene (allele), marker (allele), or SNP (allele) is heterozygous.

[0588] In certain embodiments, in the plants or plant parts according to the invention as described herein, the QTL allele, polynucleotide allele, locus allele, gene allele, marker allele, or SNP allele is heterozygous.

[0589] In certain embodiments, in the methods for identifying and/or selecting plants or plant parts according to the invention as described herein, the QTL (allele), polynucleotide (allele), locus (allele), gene (allele), marker (allele), or SNP (allele) is homozygous.

[0590] In certain embodiments, in the methods for identifying and/or selecting plants or plant parts according to the invention as described herein, the QTL allele, polynucleotide allele, locus allele, gene allele, marker allele, or SNP allele is homozygous.

[0591] In certain embodiments, in the methods for identifying and/or selecting plants or plant parts according to the invention as described herein, the QTL (allele), polynucleotide (allele), locus (allele), gene (allele), marker (allele), or SNP (allele) is heterozygous.

[0592] In certain embodiments, in the methods for identifying and/or selecting plants or plant parts according to the invention as described herein, the QTL allele, polynucleotide allele, locus allele, gene allele, marker allele, or SNP allele is heterozygous.

[0593] In certain embodiments, in the methods for generating plants or plant parts according to the invention as described herein, the QTL (allele), polynucleotide (allele), locus (allele), gene (allele), marker (allele), or SNP (allele) is homozygous.

[0594] In certain embodiments, in the methods for generating plants or plant parts according to the invention as described herein, the QTL allele, polynucleotide allele, locus allele, gene allele, marker allele, or SNP allele is homozygous.

[0595] In certain embodiments, in the methods for generating plants or plant parts according to the invention as described herein, the QTL (allele), polynucleotide (allele), locus (allele), gene (allele), marker (allele), or SNP (allele) is heterozygous.

[0596] In certain embodiments, in the methods for generating plants or plant parts according to the invention as described herein, the QTL allele, polynucleotide allele, locus allele, gene allele, marker allele, or SNP allele is heterozygous.

[0597] In certain embodiments, in the methods for identifying and/or selecting plants or plant parts according to the invention as described herein, the method comprises isolating genomic DNA from said plant or plant part.

[0598] In certain embodiments, in the methods for identifying and/or selecting plants or plant parts according to the invention as described herein, the method comprises selecting said plant or plant part.

[0599] In certain embodiments, in the methods for identifying and/or selecting plants or plant parts according to the invention as described herein, the method comprises selecting said plant or plant part if said QTL (allele), polynucleotide (allele), locus (allele), gene (allele), molecular marker (allele), SNP (allele), or haplotype is detected or identified.

[0600] In certain embodiments, in the methods for identifying and/or selecting plants or plant parts according to the invention as described herein, the method comprises selecting said plant or plant part if said QTL allele, polynucleotide allele, locus allele, gene allele, molecular marker allele, SNP allele, or haplotype is detected or identified.

[0601] In an aspect, the invention relates to a barley plant or plant part comprising the QTL (allele), polynucleic acid (allele), locus (allele), gene (allele), molecular marker (allele(s)), SNP (allele(s)), or haplotype according to the invention as described herein.

[0602] In an aspect, the invention relates to a barley plant or plant part comprising the QTL allele, polynucleic acid allele, locus allele, gene allele, molecular marker allele(s), SNP allele(s), or haplotype according to the invention as described herein.

[0603] In an aspect, the invention relates to a barley plant or plant part having (increased) BYDV and/or insect resistance and/or tolerance, comprising the QTL (allele), polynucleic acid (allele), locus (allele), gene (allele), molecular marker (allele(s)), SNP (allele(s)), or haplotype according to the invention as described herein.

[0604] In an aspect, the invention relates to a barley plant or plant part having (increased) BYDV resistance and/or tolerance, comprising the QTL (allele), polynucleic acid (allele), locus (allele), gene (allele), molecular marker (allele(s)), SNP (allele(s)), or haplotype according to the invention as described herein.

[0605] In an aspect, the invention relates to a barley plant or plant part having (increased) insect, preferably aphid, such as the aphid genera or species as described herein elsewhere, resistance and/or tolerance, comprising the QTL (allele), polynucleic acid (allele), locus (allele), gene (allele), molecular marker (allele(s)), SNP (allele(s)), or haplotype according to the invention as described herein.

[0606] In an aspect, the invention relates to a barley plant or plant part having (increased) BYDV and/or insect resistance and/or tolerance, comprising the QTL allele, polynucleic acid allele, locus allele, gene allele, molecular marker allele(s), SNP allele(s), or haplotype according to the invention as described herein (such as in comparison to a barley plant or plant part not having said polynucleotide, molecular marker (allele), locus (allele), gene (allele), QTL (allele), SNP (allele), or haplotype of the invention).

[0607] In an aspect, the invention relates to a barley plant or plant part having (increased) BYDV resistance and/or tolerance, comprising the QTL allele, polynucleic acid allele, locus allele, gene allele, molecular marker allele(s), SNP allele(s), or haplotype according to the invention as described herein (such as in comparison to a barley plant or plant part not having said polynucleotide, molecular marker (allele), locus (allele), gene (allele), QTL (allele), SNP (allele), or haplotype of the invention).

[0608] In an aspect, the invention relates to a barley plant or plant part having (increased) insect, preferably aphid, such as the aphid genera or species as described herein elsewhere, resistance and/or tolerance, comprising the QTL allele, polynucleic acid allele, locus allele, gene allele, molecular marker allele(s), SNP allele(s), or haplotype according to the invention as described herein (such as in comparison to a barley plant or plant part not having said polynucleotide, molecular marker (allele), locus (allele), gene (allele), QTL (allele), SNP (allele), or haplotype of the invention).

[0609] In an aspect, the invention relates to a barley plant or plant part, such as a barley plant or plant part having (improved) resistance (or tolerance) to Barley Yellow Dwarf Virus (BYDV) and/or insects, comprising (and expression or capable of expressing) one or more the a Barley Yellow Dwarf Virus (BYDV) and/or insect resistance gene (in particular comprising a resistance gene or a resistance locus comprising a resistance gene on chromosome 3, such as described herein elsewhere) or Ryd4Hb gene (in particular comprising a resistance gene or a resistance locus comprising a resistance gene on chromosome 3, such as described herein elsewhere) or coding sequence thereof.

[0610] In an aspect, the invention relates to a barley plant or plant part, such as a barley plant or plant part having (improved) resistance (or tolerance) to Barley Yellow Dwarf Virus (BYDV) and/or insects, comprising (and expression or capable of expressing) one or more the a Barley Yellow Dwarf Virus (BYDV) and/or insect resistance gene (in particular comprising a resistance gene or a resistance locus comprising a resistance gene on chromosome 3, such as described herein elsewhere) or Ryd4Hb gene (in particular comprising a resistance gene or a resistance locus comprising a resistance gene on chromosome 3, such as described herein elsewhere) or coding sequence thereof, and comprising one or more molecular markers (alleles), SNPs (alleles), or a haplotype as described herein elsewhere (such as for instance defined in Table 1 or 2).

[0611] In an aspect, the invention relates to a barley plant or plant part, such as a barley plant or plant part having (improved) resistance (or tolerance) to Barley Yellow Dwarf Virus (BYDV) and/or insects comprising (and expressing or capable of expressing) the Barley Yellow Dwarf Virus (BYDV) and/or insect resistance gene or the Ryd4Hb gene or coding sequence thereof and comprising one or more molecular markers (alleles) ge45717s01 and ge45718s01 and/or not comprising one or more molecular markers (alleles) ge51829s01, ge51835s01, ge45688s01, ge45691s01, and/or ge45719s01 (and the respective SNPs comprised therein) or a haplotype of Table 2.

[0612] In an aspect, the invention relates to a barley plant or plant part having a Yellow Dwarf Virus (BYDV) and/or insect resistance gene or Ryd4Hb gene, said gene has
[0613] (1) a genomic sequence of HORVU.MOREX.r2.3HG0265710, HORVU.MOREX.r2.3HG0265660, HORVU.MOREX.r2.3HG0265670, HORVU.MOREX.r2.3HG0265690, or HORVU.MOREX.r2.3HG0265720; or a sequence which is at least at least 90%, preferably at least 95%, identical to a genomic sequence of HORVU.MOREX.r2.3HG0265710, HORVU.MOREX.r2.3HG0265660, HORVU.MOREX.r2.3HG0265670, HORVU.MOREX.r2.3HG0265690, or HORVU.MOREX.r2.3HG0265720;
[0614] (2) a coding sequence of HORVU.MOREX.r2.3HG0265710, HORVU.MOREX.r2.3HG0265660, HORVU.MOREX.r2.3HG0265670, HORVU.MOREX.r2.3HG0265690, or HORVU.MOREX.r2.3HG0265720, or a coding sequence which is at least 90%, preferably at least 95%, identical to a coding sequence of HORVU.MOREX.r2.3HG0265710, HORVU.MOREX.r2.3HG0265660, HORVU.MOREX.r2.3HG0265670, HORVU.MOREX.r2.3HG0265690, or HORVU.MOREX.r2.3HG0265720;
[0615] (3) a sequence encoding a HORVU.MOREX.r2.3HG0265710, HORVU.MOREX.r2.3HG0265660, HORVU.MOREX.r2.3HG0265670, HORVU.MOREX.r2.3HG0265690, or HORVU.MOREX.r2.3HG0265720 protein; or encoding a protein having a sequence which is at least 90%, preferably at least 95%, identical to a protein sequence of HORVU.MOREX.r2.3HG0265710, HORVU.MOREX.r2.3HG0265660, HORVU.MOREX.r2.3HG0265670, HORVU.MOREX.r2.3HG0265690, or HORVU.MOREX.r2.3HG0265720; and/or
[0616] (4) a sequence hybridizing with the sequence of (1), (2), and/or (3) or a complement thereof or a reverse complement thereof (under stringent conditions); or
[0617] (5) a nucleotide sequence encoding a protein derived from the amino acid sequence encoded by the nucleotide sequence of (1) to (4) by way of substitution, deletion and/or addition of one or more amino acid(s).

[0618] In an aspect, the invention relates to a barley plant or plant part having a Yellow Dwarf Virus (BYDV) and/or insect resistance locus comprising a resistance gene or Ryd4Hb gene, said gene has
[0619] (1) a genomic sequence of HORVU.MOREX.r2.3HG0265710, HORVU.MOREX.r2.3HG0265660, HORVU.MOREX.r2.3HG0265670, HORVU.MOREX.r2.3HG0265690, or HORVU.MOREX.r2.3HG0265720; or a sequence which is at least at least 90%, preferably at least 95%, identical to a genomic sequence of HORVU.MOREX.r2.3HG0265710, HORVU.MOREX.r2.3HG0265660, HORVU.MOREX.r2.3HG0265670, HORVU.MOREX.r2.3HG0265690, or HORVU.MOREX.r2.3HG0265720;
[0620] (2) a coding sequence of HORVU.MOREX.r2.3HG0265710, HORVU.MOREX.r2.3HG0265660, HORVU.MOREX.r2.3HG0265670, HORVU.MOREX.r2.3HG0265690, or HORVU.MOREX.r2.3HG0265720, or a coding sequence which is at least 90%, preferably at least 95%, identical to a coding sequence of HORVU.MOREX.r2.3HG0265710, HORVU.MOREX.r2.3HG0265660, HORVU.MOREX.r2.3HG0265670, HORVU.MOREX.r2.3HG0265690, or HORVU.MOREX.r2.3HG0265720;
[0621] (3) a sequence encoding a HORVU.MOREX.r2.3HG0265710, HORVU.MOREX.r2.3HG0265660, HORVU.MOREX.r2.3HG0265670, HORVU.MOREX.r2.3HG0265690, or HORVU.MOREX.r2.3HG0265720 protein; or encoding a protein having a sequence which is at least 90%, preferably at least 95%, identical to a protein sequence of HORVU.MOREX.r2.3HG0265710, HORVU.MOREX.r2.3HG0265660, HORVU.MOREX.r2.3HG0265670, HORVU.MOREX.r2.3HG0265690, or HORVU.MOREX.r2.3HG0265720; and/or
[0622] (4) a sequence hybridizing with the sequence of (1), (2), and/or (3) or a complement thereof or a reverse complement thereof (under stringent conditions); or
[0623] (5) a nucleotide sequence encoding a protein derived from the amino acid sequence encoded by the nucleotide sequence of (1) to (4) by way of substitution, deletion and/or addition of one or more amino acid(s);
[0624] wherein said resistance locus comprises a polynucleic acid comprising any one or more molecular markers having a sequence as set forth in SEQ ID NOs: 3 to 9.

[0625] In an aspect, the invention relates to a barley plant or plant part having a Yellow Dwarf Virus (BYDV) and/or insect resistance locus comprising a resistance gene or Ryd4Hb gene, said gene has
[0626] (1) a genomic sequence of HORVU.MOREX.r2.3HG0265710, HORVU.MOREX.r2.3HG0265660, HORVU.MOREX.r2.3HG0265670, HORVU.MOREX.r2.3HG0265690, or HORVU.MOREX.r2.3HG0265720; or a sequence which is at least at least 90%, preferably at least 95%, identical to a genomic sequence of HORVU.MOREX.r2.3HG0265710, HORVU.MOREX.r2.3HG0265660, HORVU.MOREX.r2.3HG0265670, HORVU.MOREX.r2.3HG0265690, or HORVU.MOREX.r2.3HG0265720;
[0627] (2) a coding sequence of HORVU.MOREX.r2.3HG0265710, HORVU.MOREX.r2.3HG0265660, HORVU.MOREX.r2.3HG0265670, HORVU.MOREX.r2.3HG0265690, or HORVU.MOREX.r2.3HG0265720, or a coding sequence which is at least 90%, preferably at least 95%, identical to a coding sequence of HORVU.MOREX.r2.3HG0265710, HORVU.MOREX.r2.3HG0265660, HORVU.MOREX.r2.3HG0265670, HORVU.MOREX.r2.3HG0265690, or HORVU.MOREX.r2.3HG0265720;
[0628] (3) a sequence encoding a HORVU.MOREX.r2.3HG0265710, HORVU.MOREX.r2.3HG0265660, HORVU.MOREX.r2.3HG0265670, HORVU.MOREX.r2.3HG0265690, or HORVU.MOREX.r2.3HG0265720 protein; or encoding a protein having a sequence which is at least 90%, preferably at least 95%, identical to a protein sequence of HORVU.MOREX.r2.3HG0265710, HORVU.MOREX.r2.3HG0265660, HORVU.MOREX.r2.3HG0265670, HORVU.MOREX.r2.3HG0265690, or HORVU.MOREX.r2.3HG0265720; and/or
[0629] (4) a sequence hybridizing with the sequence of (1), (2), and/or (3) or a complement thereof or a reverse complement thereof (under stringent conditions); or
[0630] (5) a nucleotide sequence encoding a protein derived from the amino acid sequence encoded by the nucleotide sequence of (1) to (4) by way of substitution, deletion and/or addition of one or more amino acid(s);
[0631] wherein said resistance locus comprises a marker haplotype as provided in Table 2, such as: cytosine (C) or thymine (T) at a position corresponding to position 592685940 of reference genome MOREX v3, and thymine (T) at a position corresponding to position 592752433 of reference genome MOREX v3, optionally further comprising
[0632] (1) adenine (A) at a position corresponding to position 573789473 of reference genome MOREX v3, cytosine (C) at a position corresponding to position 577673982 of reference genome MOREX v3, guanine (G) at a position corresponding to position 591505046 of reference genome MOREX v3, adenine (A) at a position corresponding to position 592578134 of reference genome MOREX v3, and thymine (T) at a position corresponding to position 592849403 of reference genome MOREX v3;
[0633] (II) adenine (A) at a position corresponding to position 573789473 of reference genome MOREX v3, guanine (G) at a position corresponding to position 577673982 of reference genome MOREX v3, guanine (G) at a position corresponding to position 591505046 of reference genome MOREX v3, adenine (A) at a position corresponding to position 592578134 of reference genome MOREX v3, and thymine (T) at a position corresponding to position 592849403 of reference genome MOREX v3;
[0634] (III) adenine (A) at a position corresponding to position 573789473 of reference genome MOREX v3, guanine (G) at a position corresponding to position 577673982 of reference genome MOREX v3, thymine (T) at a position corresponding to position 591505046 of reference genome MOREX v3, adenine (A) at a position corresponding to position 592578134 of reference genome MOREX v3, and thymine (T) at a position corresponding to position 592849403 of reference genome MOREX v3;
[0635] (IV) adenine (A) at a position corresponding to position 573789473 of reference genome MOREX v3, guanine (G) at a position corresponding to position 577673982 of reference genome MOREX v3, thymine (T) at a position corresponding to position 591505046 of reference genome MOREX v3, guanine (G) at a position corresponding to position 592578134 of reference genome MOREX v3, and thymine (T) at a position corresponding to position 592849403 of reference genome MOREX v3;
[0636] (V) guanine (G) at a position corresponding to position 573789473 of reference genome MOREX v3, cytosine (C) at a position corresponding to position 577673982 of reference genome MOREX v3, guanine (G) at a position corresponding to position 591505046 of reference genome MOREX v3, adenine (A) at a position corresponding to position 592578134 of reference genome MOREX v3, and cytosine (C) at a position corresponding to position 592849403 of reference genome MOREX v3;
[0637] (VI) adenine (A) at a position corresponding to position 573789473 of reference genome MOREX v3, cytosine (C) at a position corresponding to position 577673982 of reference genome MOREX v3, guanine (G) at a position corresponding to position 591505046 of reference genome MOREX v3, adenine (A) at a position corresponding to position 592578134 of reference genome MOREX v3, and cytosine (C) at a position corresponding to position 592849403 of reference genome MOREX v3;
[0638] (VII) adenine (A) at a position corresponding to position 573789473 of reference genome MOREX v3, guanine (G) at a position corresponding to position 577673982 of reference genome MOREX v3, guanine (G) at a position corresponding to position 591505046 of reference genome MOREX v3, adenine (A) at a position corresponding to position 592578134 of reference genome MOREX v3, and cytosine (C) at a position corresponding to position 592849403 of reference genome MOREX v3;
[0639] (VIII) adenine (A) at a position corresponding to position 573789473 of reference genome MOREX v3, guanine (G) at a position corresponding to position 577673982 of reference genome MOREX v3, thymine (T) at a position corresponding to position 591505046 of reference genome MOREX v3, adenine (A) at a position corresponding to position 592578134 of reference genome MOREX v3, and cytosine (C) at a position corresponding to position 592849403 of reference genome MOREX v3; or
[0640] (IX) adenine (A) at a position corresponding to position 573789473 of reference genome MOREX v3, guanine (G) at a position corresponding to position 577673982 of reference genome MOREX v3, thymine (T) at a position corresponding to position 591505046 of reference genome MOREX v3, guanine (G) at a position corresponding to position 592578134 of reference genome MOREX v3, and cytosine (C) at a position corresponding to position 592849403 of reference genome MOREX v3;
[0641] (X) thymine (T) at position 591505046 with reference to genome MOREX v3, guanine (G) at position 592578134 with reference to genome MOREX v3, and thymine (T) at position 592849403 with reference to genome MOREX v3; or
[0642] (XI) guanine (G) at position 591505046 with reference to genome MOREX v3, adenine (A) at position 592578134 with reference to genome MOREX v3, and thymine (T) at position 592849403 with reference to genome MOREX v3.

[0643] In an aspect, the invention relates to a barley plant or plant part, such as a barley plant or plant part having (improved) resistance (or tolerance) to Barley Yellow Dwarf Virus (BYDV) and/or insects, comprising the polynucleic acid of the invention as described herein elsewhere. In an aspect, the invention relates to a barley plant or plant part, such as a barley plant or plant part having (improved) resistance (or tolerance) to Barley Yellow Dwarf Virus (BYDV) and/or insects, comprising the QTL of the invention as described herein elsewhere. In an aspect, the invention relates to a barley plant or plant part, such as a barley plant or plant part having (improved) resistance (or tolerance) to Barley Yellow Dwarf Virus (BYDV) and/or insects, comprising the (resistance locus) of the invention as described herein elsewhere. In an aspect, the invention relates to a barley plant or plant part, such as a barley plant or plant part having (improved) resistance (or tolerance) to Barley Yellow Dwarf Virus (BYDV) and/or insects, comprising the (resistance) gene of the invention as described herein elsewhere. Such plants preferably comprise one or more of the molecular markers of the invention as described herein elsewhere (and comprising the respective SNPs), or a haplotype of Table 2.

[0644] In certain embodiments, the resistance locus in the barley plant or plant part, the methods for identifying a barley plant or plant part, or the methods for generating or obtaining a barley plant or plant part as described herein has the marker haplotype:
[0645] cytosine (C) at a position corresponding to position 592685940 of reference genome MOREX v3 or the corresponding position in SEQ ID NO: 7, and thymine (T) at a position corresponding to position 592752433 of reference genome MOREX v3 or the corresponding position in SEQ ID NO: 8.

[0646] In certain embodiments, resistance locus in the barley plant or plant part, the methods for identifying a barley plant or plant part, or the methods for generating or obtaining a barley plant or plant part as described herein has a marker haplotype as provided in Table 2, such as:
[0647] (I) adenine (A) at a position corresponding to position 573789473 of reference genome MOREX v3, cytosine (C) at a position corresponding to position 577673982 of reference genome MOREX v3, guanine (G) at a position corresponding to position 591505046 of reference genome MOREX v3, adenine (A) at a position corresponding to position 592578134 of reference genome MOREX v3, and thymine (T) at a position corresponding to position 592849403 of reference genome MOREX v3;
[0648] (II) adenine (A) at a position corresponding to position 573789473 of reference genome MOREX v3, guanine (G) at a position corresponding to position 577673982 of reference genome MOREX v3, guanine (G) at a position corresponding to position 591505046 of reference genome MOREX v3, adenine (A) at a position corresponding to position 592578134 of reference genome MOREX v3, and thymine (T) at a position corresponding to position 592849403 of reference genome MOREX v3;
[0649] (III) adenine (A) at a position corresponding to position 573789473 of reference genome MOREX v3, guanine (G) at a position corresponding to position 577673982 of reference genome MOREX v3, thymine (T) at a position corresponding to position 591505046 of reference genome MOREX v3, adenine (A) at a position corresponding to position 592578134 of reference genome MOREX v3, and thymine (T) at a position corresponding to position 592849403 of reference genome MOREX v3;
[0650] (IV) adenine (A) at a position corresponding to position 573789473 of reference genome MOREX v3, guanine (G) at a position corresponding to position 577673982 of reference genome MOREX v3, thymine (T) at a position corresponding to position 591505046 of reference genome MOREX v3, guanine (G) at a position corresponding to position 592578134 of reference genome MOREX v3, and thymine (T) at a position corresponding to position 592849403 of reference genome MOREX v3;
[0651] (V) guanine (G) at a position corresponding to position 573789473 of reference genome MOREX v3, cytosine (C) at a position corresponding to position 577673982 of reference genome MOREX v3, guanine (G) at a position corresponding to position 591505046 of reference genome MOREX v3, adenine (A) at a position corresponding to position 592578134 of reference genome MOREX v3, and cytosine (C) at a position corresponding to position 592849403 of reference genome MOREX v3;
[0652] (VI) adenine (A) at a position corresponding to position 573789473 of reference genome MOREX v3, cytosine (C) at a position corresponding to position 577673982 of reference genome MOREX v3, guanine (G) at a position corresponding to position 591505046 of reference genome MOREX v3, adenine (A) at a position corresponding to position 592578134 of reference genome MOREX v3, and cytosine (C) at a position corresponding to position 592849403 of reference genome MOREX v3;
[0653] (VII) adenine (A) at a position corresponding to position 573789473 of reference genome MOREX v3, guanine (G) at a position corresponding to position 577673982 of reference genome MOREX v3, guanine (G) at a position corresponding to position 591505046 of reference genome MOREX v3, adenine (A) at a position corresponding to position 592578134 of reference genome MOREX v3, and cytosine (C) at a position corresponding to position 592849403 of reference genome MOREX v3;
[0654] (VIII) adenine (A) at a position corresponding to position 573789473 of reference genome MOREX v3, guanine (G) at a position corresponding to position 577673982 of reference genome MOREX v3, thymine (T) at a position corresponding to position 591505046 of reference genome MOREX v3, adenine (A) at a position corresponding to position 592578134 of reference genome MOREX v3, and cytosine (C) at a position corresponding to position 592849403 of reference genome MOREX v3; or
[0655] (IX) adenine (A) at a position corresponding to position 573789473 of reference genome MOREX v3, guanine (G) at a position corresponding to position 577673982 of reference genome MOREX v3, thymine (T) at a position corresponding to position 591505046 of reference genome MOREX v3, guanine (G) at a position corresponding to position 592578134 of reference genome MOREX v3, and cytosine (C) at a position corresponding to position 592849403 of reference genome MOREX v3;
[0656] (X) thymine (T) at position 591505046 with reference to genome MOREX v3, guanine (G) at position 592578134 with reference to genome MOREX v3, and thymine (T) at position 592849403 with reference to genome MOREX v3; or
[0657] (XI) guanine (G) at position 591505046 with reference to genome MOREX v3, adenine (A) at position 592578134 with reference to genome MOREX v3, and thymine (T) at position 592849403 with reference to genome MOREX v3.

[0658] Suitable preferred marker/SNP haplotypes according to embodiments of the invention are provided in Table 2 below.

TABLE 2
Marker/SNP haplotypes diagnostic for BYDV and/or insect resistance
(SNPs for the respective markers are indicated)

| | Marker | | | | | | |
|---|---|---|---|---|---|---|---|
| Haplotype | ge51829s01 | ge51835s01 | ge45688s01 | ge45691s01 | ge45717s01 | ge45718s01 | ge45719s01 |
| 1 | A | C | G | A | C | T | T |
| 2 | A | G | G | A | C | T | T |
| 3 | A | G | T | A | C | T | T |
| 4 | A | G | T | G | C | T | T |
| 5 | A | C | T | G | T | T | T |
| 6 | A | G | T | G | T | T | T |
| 7 | | | G | A | C | T | T |
| 8 | | | T | G | T | T | T |
| 9 | | | | | | T | T |
| 10 | | | | G | T | T | |
| 11 | | | T | | T | T | |
| 12 | | | | G | T | | T |
| 13 | | | T | | T | | T |
| 14 | | | | | T | T | |
| 15 | | | | | T | | T |
| 16 | | | G | | C | | |
| 17 | | | | A | C | | |
| 18 | | | G | | | T | |
| 19 | | | | A | | T | |
| 20 | | | G | | | | T |
| 21 | | | | A | | | T |
| 22 | | | T | | | T | |
| 23 | | | | G | | T | |
| 24 | | | T | | | | T |
| 25 | | | | G | | | T |
| 26 | | | | | | | T |
| 27 | | | | | | T | |
| 28 | | | | | C | | |
| 29 | | | | | C | T | |
| 30 | | | | | T | T | |
| 31 | G | C | G | A | C | T | C |
| 32 | A | C | G | A | C | T | C |
| 33 | A | G | G | A | C | T | C |
| 34 | A | G | T | A | C | T | C |
| 35 | A | G | T | G | C | T | C |

[0659] In certain aspects and embodiments of the methods for screening or identifying of the invention, the method comprises screening for any of haplotypes 1 to 35, 1 to 30, 5 to 30, or 7 to 30 of Table 2. In certain aspects and embodiments of the methods for screening or identifying of the invention, the method comprises screening for any of haplotypes 7 to 30 of Table 2, such as in particular comprising the SNP which is T in marker ge45718s01 and/or ge45719s01, preferably both, and optionally further comprising the SNP which is G in marker ge45688s01, A in marker ge45691 s01 and C in marker ge45717s01, or optionally further comprising the SNP which is T in marker ge45688s01, G in marker ge45691s01 and T in marker ge45717s01. If the haplotype is identified, the plant or plant part is identified (and selected) as being resistant to BYDV and/or insects.

[0660] In certain embodiments, the one or more polynucleic acid, resistance locus (allele), QTL (allele), molecular marker (allele), resistance gene (allele), Ryd4Hb (allele), or SNP (allele) is homozygous.

[0661] In certain embodiments, the one or more polynucleic acid, resistance locus (allele), QTL (allele), molecular marker (allele), resistance gene (allele), Ryd4Hb (allele), or SNP (allele) is heterozygous.

[0662] In certain embodiments, the polynucleotide, QTL, or resistance locus in the barley plant or plant part comprises
[0663] a) the nucleotide sequence having SEQ ID NO: 1,
[0664] b) a nucleotide sequence hybridizing with the nucleotide sequence of a) or a complement thereof or a reverse complement thereof under stringent conditions,
[0665] c) a nucleotide sequence having an identity of at least 90% to the nucleotide sequence of a).

[0666] In certain embodiments, the polynucleotide, QTL, or resistance locus in the barley plant or plant part comprises on chromosome 3
[0667] a) the nucleotide sequence having SEQ ID NO: 1,
[0668] b) a nucleotide sequence hybridizing with the nucleotide sequence of a) or a complement thereof or a reverse complement thereof under stringent conditions,
[0669] c) a nucleotide sequence having an identity of at least 90% to the nucleotide sequence of a).

[0670] In certain embodiments, the polynucleotide, QTL, or resistance locus in the barley plant or plant part comprises the resistance gene located on chromosome 3 in a region comprising
[0671] a) the nucleotide sequence having SEQ ID NO: 1,
[0672] b) a nucleotide sequence hybridizing with the nucleotide sequence of a) or a complement thereof or a reverse complement thereof under stringent conditions,
[0673] c) a nucleotide sequence having an identity of at least 90% to the nucleotide sequence of a).

[0674] In certain embodiments, the plant or plant part according to the invention as described herein is mutagenized. In certain embodiments, the plant or plant part selected or identified according to the invention as described herein is mutagenized. In certain embodiments, the plant or plant part generated according to the invention as described herein is mutagenized.

[0675] In certain embodiments, the plant or plant part according to the invention as described herein is gene-edited. In certain embodiments, the plant or plant part selected or identified according to the invention as described herein is gene-edited. In certain embodiments, the plant or plant part generated according to the invention as described herein is gene-edited.

[0676] In certain embodiments, the plant or plant part according to the invention as described herein is transgenic. In certain embodiments, the plant or plant part selected or identified according to the invention as described herein is transgenic. In certain embodiments, the plant or plant part generated according to the invention as described herein is transgenic.

[0677] In certain embodiments, the plant or plant part according to the invention as described herein is transformed. In certain embodiments, the plant or plant part selected or identified according to the invention as described herein is transformed. In certain embodiments, the plant or plant part generated according to the invention as described herein is transformed.

[0678] In certain embodiments, the plant or plant part according to the invention as described herein is obtained by introgression of a polynucleic acid (allele), QTL (allele), locus (allele), gene (allele(s)), molecular marker (allele(s)), SNP (allele(s)), or haplotype of the invention as described herein.

[0679] In certain embodiments, the plant or plant part according to the invention as described herein is obtained by transformation of a polynucleic acid (allele), QTL (allele), locus (allele), gene (allele(s)), molecular marker (allele(s)), SNP (allele(s)), or haplotype of the invention as described herein.

[0680] In certain embodiments, the plant or plant part according to the invention as described herein is obtained by introgression of a polynucleic acid allele, QTL allele, locus allele, gene allele(s), molecular marker allele(s), SNP allele(s), or haplotype of the invention as described herein.

[0681] In certain embodiments, the plant or plant part according to the invention as described herein is obtained by transformation of a polynucleic acid allele, QTL allele, locus allele, gene allele(s), molecular marker allele(s), SNP allele(s), or haplotype of the invention as described herein.

[0682] In certain embodiments, the plant or plant part according to the invention as described herein is obtained by introgression of a BYDV and/or insect resistance polynucleic acid allele, QTL allele, locus allele, gene allele(s), molecular marker allele(s), SNP allele(s), or haplotype of the invention as described herein.

[0683] In certain embodiments, the plant or plant part according to the invention as described herein is obtained by transformation of a BYDV and/or insect resistance polynucleic acid allele, QTL allele, locus allele, gene allele(s), molecular marker allele(s), SNP allele(s), or haplotype of the invention as described herein.

[0684] In an aspect, the invention relates to a method for generating, producing, or obtaining a barley plant or plant part, comprising
[0685] providing a seed mixture harvested from a cross between a first barley parent plant (population) and a second barley parent plant (population), wherein said first and/or second parent plant (population) comprises a polynucleic acid (allele), molecular marker (allele), locus (allele), gene (allele), QTL (allele), or SNP (allele), or haplotype according to the invention as described herein;
[0686] selecting seeds comprising a polynucleic acid (allele), molecular marker (allele), QTL (allele), gene (allele), or SNP (allele), or haplotype according to the invention as described herein.

[0687] In an aspect, the invention relates to a method for generating, producing, or obtaining a barley plant or plant part, comprising
[0688] providing a seed mixture harvested from a cross between a first barley parent plant (population) and a second barley parent plant (population), wherein said first and/or second parent plant (population) comprises a BYDV and/or insect resistance polynucleic acid (allele), molecular marker (allele), locus (allele), gene (allele), QTL (allele), or SNP (allele), or haplotype according to the invention as described herein;
[0689] selecting seeds comprising said BYDV and/or insect resistance polynucleic acid (allele), molecular marker (allele), QTL (allele), gene (allele), or SNP (allele), or haplotype according to the invention as described herein.

[0690] In an aspect, the invention relates to a method for generating or producing a barley plant or plant part, such as a barley plant or plant part having (improved) resistance (or tolerance) to Barley Yellow Dwarf Virus (BYDV) and/or insects, and/or for improving BYDV or insect resistance (or tolerance) in a barley plant or plant part, comprising introducing into the genome of a barley plant or plant part a polynucleic acid comprising the Barley Yellow Dwarf Virus (BYDV) and/or insect resistance gene or the Ryd4Hb gene or coding sequence thereof, one or more polynucleotide, one or more (molecular) marker (allele), or one or more SNP of the invention as described herein.

[0691] In an aspect, the invention relates to a method for generating or producing a barley plant or plant part, such as a barley plant or plant part having (improved) resistance (or tolerance) to Barley Yellow Dwarf Virus (BYDV) and/or insects, and/or for improving BYDV or insect resistance (or tolerance) in a barley plant or plant part, comprising introducing into the genome of a barley plant or plant part a BYDV and/or insect resistance locus of the invention as described herein.

[0692] In an aspect, the invention relates to a method for generating or producing a barley plant or plant part, such as a barley plant or plant part having (improved) resistance (or tolerance) to Barley Yellow Dwarf Virus (BYDV) and/or insects, and/or for improving BYDV or insect resistance (or tolerance) in a barley plant or plant part, comprising introducing into the genome of a barley plant or plant part a Yellow Dwarf Virus (BYDV) and/or insect resistance gene or Ryd4Hb gene having
[0693] (1) a genomic sequence of HORVU.MOREX.r2.3HG0265710, HORVU.MOREX.r2.3HG0265660, HORVU.MOREX.r2.3HG0265670, HORVU.MOREX.r2.3HG0265690, or HORVU.MOREX.r2.3HG0265720; or a sequence which is at least at least 90%, preferably at least 95%, identical to a genomic sequence of HORVU.MOREX.r2.3HG0265710, HORVU.MOREX.r2.3HG0265660, HORVU.MOREX.r2.3HG0265670, HORVU.MOREX.r2.3HG0265690, or HORVU.MOREX.r2.3HG0265720;
[0694] (2) a coding sequence of HORVU.MOREX.r2.3HG0265710, HORVU.MOREX.r2.3HG0265660, HORVU.MOREX.r2.3HG0265670, HORVU.MOREX.r2.3HG0265690, or HORVU.MOREX.r2.3HG0265720, or a coding sequence which is at least 90%, preferably at least 95%, identical to a coding sequence of HORVU.MOREX.r2.3HG0265710, HORVU.MOREX.r2.3HG0265660, HORVU.MOREX.r2.3HG0265670, HORVU.MOREX.r2.3HG0265690, or HORVU.MOREX.r2.3HG0265720;
[0695] (3) a sequence encoding a HORVU.MOREX.r2.3HG0265710, HORVU.MOREX.r2.3HG0265660, HORVU.MOREX.r2.3HG0265670, HORVU.MOREX.r2.3HG0265690, or HORVU.MOREX.r2.3HG0265720 protein; or encoding a protein having a sequence which is at least 90%, preferably at least 95%, identical to a protein sequence of HORVU.MOREX.r2.3HG0265710, HORVU.MOREX.r2.3HG0265660, HORVU.MOREX.r2.3HG0265670, HORVU.MOREX.r2.3HG0265690, or HORVU.MOREX.r2.3HG0265720; and/or
[0696] (4) a sequence hybridizing with the sequence of (1), (2), and/or (3) or a complement thereof or a reverse complement thereof (under stringent conditions); or
[0697] (5) a nucleotide sequence encoding a protein derived from the amino acid sequence encoded by the nucleotide sequence of (1) to (4) by way of substitution, deletion and/or addition of one or more amino acid(s).

[0698] In an aspect, the invention relates to a method for generating or producing a barley plant or plant part, such as a barley plant or plant part having (improved) resistance (or tolerance) to Barley Yellow Dwarf Virus (BYDV) and/or insects, and/or for improving BYDV or insect resistance (or tolerance) in a barley plant or plant part, comprising introducing into the genome of a barley plant or plant part a Yellow Dwarf Virus (BYDV) and/or insect resistance locus comprising av resistance gene or Ryd4Hb gene having
[0699] (1) a genomic sequence of HORVU.MOREX.r2.3HG0265710, HORVU.MOREX.r2.3HG0265660, HORVU.MOREX.r2.3HG0265670, HORVU.MOREX.r2.3HG0265690, or HORVU.MOREX.r2.3HG0265720; or a sequence which is at least at least 90%, preferably at least 95%, identical to a genomic sequence of HORVU.MOREX.r2.3HG0265710, HORVU.MOREX.r2.3HG0265660, HORVU.MOREX.r2.3HG0265670, HORVU.MOREX.r2.3HG0265690, or HORVU.MOREX.r2.3HG0265720;
[0700] (2) a coding sequence of HORVU.MOREX.r2.3HG0265710, HORVU.MOREX.r2.3HG0265660, HORVU.MOREX.r2.3HG0265670, HORVU.MOREX.r2.3HG0265690, or HORVU.MOREX.r2.3HG0265720, or a coding sequence which is at least 90%, preferably at least 95%, identical to a coding sequence of HORVU.MOREX.r2.3HG0265710, HORVU.MOREX.r2.3HG0265660, HORVU.MOREX.r2.3HG0265670, HORVU.MOREX.r2.3HG0265690, or HORVU.MOREX.r2.3HG0265720;
[0701] (3) a sequence encoding a HORVU.MOREX.r2.3HG0265710, HORVU.MOREX.r2.3HG0265660, HORVU.MOREX.r2.3HG0265670, HORVU.MOREX.r2.3HG0265690, or HORVU.MOREX.r2.3HG0265720 protein; or encoding a protein having a sequence which is at least 90%, preferably at least 95%, identical to a protein sequence of HORVU.MOREX.r2.3HG0265710, HORVU.MOREX.r2.3HG0265660, HORVU.MOREX.r2.3HG0265670, HORVU.MOREX.r2.3HG0265690, or HORVU.MOREX.r2.3HG0265720; and/or
[0702] (4) a sequence hybridizing with the sequence of (1), (2), and/or (3) or a complement thereof or a reverse complement thereof (under stringent conditions); or
[0703] (5) a nucleotide sequence encoding a protein derived from the amino acid sequence encoded by the nucleotide sequence of (1) to (4) by way of substitution, deletion and/or addition of one or more amino acid(s) said resistance locus comprising any one or more molecular markers ge51829s01, ge51835s01, ge45688s01, ge45691s01, ge45717s01, ge45718s01, and ge45719s01 or any one or more molecular markers having a sequence as set forth in SEQ ID NOs: 3 to 9.

[0704] In an aspect, the invention relates to a method for generating or producing a barley plant or plant part, such as a barley plant or plant part having (improved) resistance (or tolerance) to Barley Yellow Dwarf Virus (BYDV) and/or insects, and/or for improving BYDV or insect resistance (or tolerance) in a barley plant or plant part, comprising introducing into the genome of a barley plant or plant part a Yellow Dwarf Virus (BYDV) and/or insect resistance locus comprising av resistance gene or Ryd4Hb gene having
[0705] (1) a genomic sequence of HORVU.MOREX.r2.3HG0265710, HORVU.MOREX.r2.3HG0265660, HORVU.MOREX.r2.3HG0265670, HORVU.MOREX.r2.3HG0265690, or HORVU.MOREX.r2.3HG0265720; or a sequence which is at least at least 90%, preferably at least 95%, identical to a genomic sequence of HORVU.MOREX.r2.3HG0265710, HORVU.MOREX.r2.3HG0265660, HORVU.MOREX.r2.3HG0265670, HORVU.MOREX.r2.3HG0265690, or HORVU.MOREX.r2.3HG0265720;
[0706] (2) a coding sequence of HORVU.MOREX.r2.3HG0265710, HORVU.MOREX.r2.3HG0265660, HORVU.MOREX.r2.3HG0265670, HORVU.MOREX.r2.3HG0265690, or HORVU.MOREX.r2.3HG0265720, or a coding sequence which is at least 90%, preferably at least 95%, identical to a coding sequence of HORVU.MOREX.r2.3HG0265710, HORVU.MOREX.r2.3HG0265660, HORVU.MOREX.r2.3HG0265670, HORVU.MOREX.r2.3HG0265690, or HORVU.MOREX.r2.3HG0265720;
[0707] (3) a sequence encoding a HORVU.MOREX.r2.3HG0265710, HORVU.MOREX.r2.3HG0265660, HORVU.MOREX.r2.3HG0265670, HORVU.MOREX.r2.3HG0265690, or HORVU.MOREX.r2.3HG0265720 protein; or encoding a protein having a sequence which is at least 90%, preferably at least 95%, identical to a protein sequence of HORVU.MOREX.r2.3HG0265710, HORVU.MOREX.r2.3HG0265660, HORVU.MOREX.r2.3HG0265670, HORVU.MOREX.r2.3HG0265690, or HORVU.MOREX.r2.3HG0265720; and/or
[0708] (4) a sequence hybridizing with the sequence of (1), (2), and/or (3) or a complement thereof or a reverse complement thereof (under stringent conditions); or
[0709] (5) a nucleotide sequence encoding a protein derived from the amino acid sequence encoded by the nucleotide sequence of (1) to (4) by way of substitution, deletion and/or addition of one or more amino acid(s) said resistance locus comprising a marker haplotype as provided in Table 2, such as: cytosine (C) at a position corresponding to position 592685940 of reference genome MOREX v3, and thymine (T) at a position corresponding to position 592752433 of reference genome MOREX v3, optionally further comprising
[0710] (I) adenine (A) at a position corresponding to position 573789473 of reference genome MOREX v3, cytosine (C) at a position corresponding to position 577673982 of reference genome MOREX v3, guanine (G) at a position corresponding to position 591505046 of reference genome MOREX v3, adenine (A) at a position corresponding to position 592578134 of reference genome MOREX v3, and thymine (T) at a position corresponding to position 592849403 of reference genome MOREX v3;
[0711] (II) adenine (A) at a position corresponding to position 573789473 of reference genome MOREX v3, guanine (G) at a position corresponding to position 577673982 of reference genome MOREX v3, guanine (G) at a position corresponding to position 591505046 of reference genome MOREX v3, adenine (A) at a position corresponding to position 592578134 of reference genome MOREX v3, and thymine (T) at a position corresponding to position 592849403 of reference genome MOREX v3;
[0712] (III) adenine (A) at a position corresponding to position 573789473 of reference genome MOREX v3, guanine (G) at a position corresponding to position 577673982 of reference genome MOREX v3, thymine (T) at a position corresponding to position 591505046 of reference genome MOREX v3, adenine (A) at a position corresponding to position 592578134 of reference genome MOREX v3, and thymine (T) at a position corresponding to position 592849403 of reference genome MOREX v3;
[0713] (IV) adenine (A) at a position corresponding to position 573789473 of reference genome MOREX v3, guanine (G) at a position corresponding to position 577673982 of reference genome MOREX v3, thymine (T) at a position corresponding to position 591505046 of reference genome MOREX v3, guanine (G) at a position corresponding to position 592578134 of reference genome MOREX v3, and thymine (T) at a position corresponding to position 592849403 of reference genome MOREX v3;
[0714] (V) guanine (G) at a position corresponding to position 573789473 of reference genome MOREX v3, cytosine (C) at a position corresponding to position 577673982 of reference genome MOREX v3, guanine (G) at a position corresponding to position 591505046 of reference genome MOREX v3, adenine (A) at a position corresponding to position 592578134 of reference genome MOREX v3, and cytosine (C) at a position corresponding to position 592849403 of reference genome MOREX v3; (VI) adenine (A) at a position corresponding to position 573789473 of reference genome MOREX v3, cytosine (C) at a position corresponding to position 577673982 of reference genome MOREX v3, guanine (G) at a position corresponding to position 591505046 of reference genome MOREX v3, adenine (A) at a position corresponding to position 592578134 of reference genome MOREX v3, and cytosine (C) at a position corresponding to position 592849403 of reference genome MOREX v3;
[0715] (VII) adenine (A) at a position corresponding to position 573789473 of reference genome MOREX v3, guanine (G) at a position corresponding to position 577673982 of reference genome MOREX v3, guanine (G) at a position corresponding to position 591505046 of reference genome MOREX v3, adenine (A) at a position corresponding to position 592578134 of reference genome MOREX v3, and cytosine (C) at a position corresponding to position 592849403 of reference genome MOREX v3;
[0716] (VIII) adenine (A) at a position corresponding to position 573789473 of reference genome MOREX v3, guanine (G) at a position corresponding to position 577673982 of reference genome MOREX v3, thymine (T) at a position corresponding to position 591505046 of reference genome MOREX v3, adenine (A) at a position corresponding to position 592578134 of reference genome MOREX v3, and cytosine (C) at a position corresponding to position 592849403 of reference genome MOREX v3;
[0717] (IX) adenine (A) at a position corresponding to position 573789473 of reference genome MOREX v3, guanine (G) at a position corresponding to position 577673982 of reference genome MOREX v3, thymine (T) at a position corresponding to position 591505046 of reference genome MOREX v3, guanine (G) at a position corresponding to position 592578134 of reference genome MOREX v3, and cytosine (C) at a position corresponding to position 592849403 of reference genome MOREX v3;
[0718] (X) thymine (T) at position 591505046 with reference to genome MOREX v3, guanine (G) at position 592578134 with reference to genome MOREX v3, and thymine (T) at position 592849403 with reference to genome MOREX v3; or
[0719] (XI) guanine (G) at position 591505046 with reference to genome MOREX v3, adenine (A) at position 592578134 with reference to genome MOREX v3, and thymine (T) at position 592849403 with reference to genome MOREX v3.

[0720] Preferably, said resistance locus has
[0721] a) the nucleotide sequence having SEQ ID NO: 1,
[0722] b) a nucleotide sequence hybridizing with the nucleotide sequence of a) or a complement thereof or a reverse complement thereof under stringent conditions,
[0723] c) a nucleotide sequence having an identity of at least 90% to the nucleotide sequence of a).

[0724] In an aspect, the invention relates to a method for generating or producing a barley plant or plant part, such as a barley plant or plant part having (improved) resistance (or tolerance) to Barley Yellow Dwarf Virus (BYDV) and/or insects, and/or for improving BYDV or insect resistance (or tolerance) in a barley plant or plant part, comprising introducing into the genome of a barley plant or plant part a polynucleotide having
[0725] a) the nucleotide sequence having SEQ ID NO: 1,
[0726] b) a nucleotide sequence hybridizing with the nucleotide sequence of a) or a complement thereof or a reverse complement thereof under stringent conditions,
[0727] c) a nucleotide sequence having an identity of at least 90% to the nucleotide sequence of a).

[0728] In an aspect, the invention relates to a method for generating or producing a barley plant or plant part, such as a barley plant or plant part having (improved) resistance (or tolerance) to Barley Yellow Dwarf Virus (BYDV) and/or insects, and/or for improving BYDV or insect resistance (or tolerance) in a barley plant or plant part, comprising introducing into the genome of a barley plant or plant part a polynucleotide having
[0729] a) the nucleotide sequence having SEQ ID NO: 1,
[0730] b) a nucleotide sequence hybridizing with the nucleotide sequence of a) or a complement thereof or a reverse complement thereof under stringent conditions, and comprising one or more of the molecular marker (allele) or SNP (allele), or the haplotype of the invention as described herein,
[0731] c) a nucleotide sequence having an identity of at least 90% to the nucleotide sequence of
[0732] a), and comprising one or more of the molecular marker (allele) or SNP (allele), or the haplotype of the invention as described herein.

[0733] In an aspect, the invention relates to a method for generating, producing, or obtaining a barley plant or plant part having a Yellow Dwarf Virus (BYDV) and/or insect resistance gene or Ryd4Hb gene, said gene has
[0734] (1) a genomic sequence of HORVU.MOREX.r2.3HG0265710, HORVU.MOREX.r2.3HG0265660, HORVU.MOREX.r2.3HG0265670, HORVU.MOREX.r2.3HG0265690, or HORVU.MOREX.r2.3HG0265720; or a sequence which is at least at least 90%, preferably at least 95%, identical to a genomic sequence of HORVU.MOREX.r2.3HG0265710, HORVU.MOREX.r2.3HG0265660, HORVU.MOREX.r2.3HG0265670, HORVU.MOREX.r2.3HG0265690, or HORVU.MOREX.r2.3HG0265720;
[0735] (2) a coding sequence of HORVU.MOREX.r2.3HG0265710, HORVU.MOREX.r2.3HG0265660, HORVU.MOREX.r2.3HG0265670, HORVU.MOREX.r2.3HG0265690, or HORVU.MOREX.r2.3HG0265720, or a coding sequence which is at least 90%, preferably at least 95%, identical to a coding sequence of HORVU.MOREX.r2.3HG0265710, HORVU.MOREX.r2.3HG0265660, HORVU.MOREX.r2.3HG0265670, HORVU.MOREX.r2.3HG0265690, or HORVU.MOREX.r2.3HG0265720;
[0736] (3) a sequence encoding a HORVU.MOREX.r2.3HG0265710, HORVU.MOREX.r2.3HG0265660, HORVU.MOREX.r2.3HG0265670, HORVU.MOREX.r2.3HG0265690, or HORVU.MOREX.r2.3HG0265720 protein; or encoding a protein having a sequence which is at least 90%, preferably at least 95%, identical to a protein sequence of HORVU.MOREX.r2.3HG0265710, HORVU.MOREX.r2.3HG0265660, HORVU.MOREX.r2.3HG0265670, HORVU.MOREX.r2.3HG0265690, or HORVU.MOREX.r2.3HG0265720; and/or
[0737] (4) a sequence hybridizing with the sequence of (1), (2), and/or (3) or a complement thereof or a reverse complement thereof (under stringent conditions); or
[0738] (5) a nucleotide sequence encoding a protein derived from the amino acid sequence encoded by the nucleotide sequence of (1) to (4) by way of substitution, deletion and/or addition of one or more amino acid(s)
[0739] comprising introducing (in the genome of) a barley plant or plant part a resistance locus comprising any one or more molecular markers ge51829s01, ge51835s01, ge45688s01, ge45691s01, ge45717s01, ge45718s01, and ge45719s01 or any one or more molecular markers having a sequence as set forth in SEQ ID NOs: 3 to 9.

[0740] In an aspect, the invention relates to a barley plant or plant part having a Yellow Dwarf Virus (BYDV) and/or insect resistance locus comprising a resistance gene or Ryd4Hb gene, said gene has
[0741] (1) a genomic sequence of HORVU.MOREX.r2.3HG0265710, HORVU.MOREX.r2.3HG0265660, HORVU.MOREX.r2.3HG0265670, HORVU.MOREX.r2.3HG0265690, or HORVU.MOREX.r2.3HG0265720; or a sequence which is at least at least 90%, preferably at least 95%, identical to a genomic sequence of HORVU.MOREX.r2.3HG0265710, HORVU.MOREX.r2.3HG0265660, HORVU.MOREX.r2.3HG0265670, HORVU.MOREX.r2.3HG0265690, or HORVU.MOREX.r2.3HG0265720;
[0742] (2) a coding sequence of HORVU.MOREX.r2.3HG0265710, HORVU.MOREX.r2.3HG0265660, HORVU.MOREX.r2.3HG0265670, HORVU.MOREX.r2.3HG0265690, or HORVU.MOREX.r2.3HG0265720, or a coding sequence which is at least 90%, preferably at least 95%, identical to a coding sequence of HORVU.MOREX.r2.3HG0265710, HORVU.MOREX.r2.3HG0265660, HORVU.MOREX.r2.3HG0265670, HORVU.MOREX.r2.3HG0265690, or HORVU.MOREX.r2.3HG0265720;
[0743] (3) a sequence encoding a HORVU.MOREX.r2.3HG0265710, HORVU.MOREX.r2.3HG0265660, HORVU.MOREX.r2.3HG0265670, HORVU.MOREX.r2.3HG0265690, or HORVU.MOREX.r2.3HG0265720 protein; or encoding a protein having a sequence which is at least 90%, preferably at least 95%, identical to a protein sequence of HORVU.MOREX.r2.3HG0265710, HORVU.MOREX.r2.3HG0265660, HORVU.MOREX.r2.3HG0265670, HORVU.MOREX.r2.3HG0265690, or HORVU.MOREX.r2.3HG0265720; and/or
[0744] (4) a sequence hybridizing with the sequence of (1), (2), and/or (3) or a complement thereof or a reverse complement thereof (under stringent conditions); or
[0745] (5) a nucleotide sequence encoding a protein derived from the amino acid sequence encoded by the nucleotide sequence of (1) to (4) by way of substitution, deletion and/or addition of one or more amino acid(s);
[0746] comprising introducing (in the genome of) a barley plant or plant part a resistance locus comprising a marker haplotype as provided in Table 2, such as:
[0747] cytosine (C) or thymine (T) at a position corresponding to position 592685940 of reference genome MOREX v3, and thymine (T) at a position corresponding to position 592752433 of reference genome MOREX v3, optionally further comprising
[0748] (I) adenine (A) at a position corresponding to position 573789473 of reference genome MOREX v3, cytosine (C) at a position corresponding to position 577673982 of reference genome MOREX v3, guanine (G) at a position corresponding to position 591505046 of reference genome MOREX v3, adenine (A) at a position corresponding to position 592578134 of reference genome MOREX v3, and thymine (T) at a position corresponding to position 592849403 of reference genome MOREX v3;
[0749] (II) adenine (A) at a position corresponding to position 573789473 of reference genome MOREX v3, guanine (G) at a position corresponding to position 577673982 of reference genome MOREX v3, guanine (G) at a position corresponding to position 591505046 of reference genome MOREX v3, adenine (A) at a position corresponding to position 592578134 of reference genome MOREX v3, and thymine (T) at a position corresponding to position 592849403 of reference genome MOREX v3;
[0750] (III) adenine (A) at a position corresponding to position 573789473 of reference genome MOREX v3, guanine (G) at a position corresponding to position 577673982 of reference genome MOREX v3, thymine (T) at a position corresponding to position 591505046 of reference genome MOREX v3, adenine (A) at a position corresponding to position 592578134 of reference genome MOREX v3, and thymine (T) at a position corresponding to position 592849403 of reference genome MOREX v3;
[0751] (IV) adenine (A) at a position corresponding to position 573789473 of reference genome MOREX v3, guanine (G) at a position corresponding to position 577673982 of reference genome MOREX v3, thymine (T) at a position corresponding to position 591505046 of reference genome MOREX v3, guanine (G) at a position corresponding to position 592578134 of reference genome MOREX v3, and thymine (T) at a position corresponding to position 592849403 of reference genome MOREX v3;
[0752] (V) guanine (G) at a position corresponding to position 573789473 of reference genome MOREX v3, cytosine (C) at a position corresponding to position 577673982 of reference genome MOREX v3, guanine (G) at a position corresponding to position 591505046 of reference genome MOREX v3, adenine (A) at a position corresponding to position 592578134 of reference genome MOREX v3, and cytosine (C) at a position corresponding to position 592849403 of reference genome MOREX v3;
[0753] (VI) adenine (A) at a position corresponding to position 573789473 of reference genome MOREX v3, cytosine (C) at a position corresponding to position 577673982 of reference genome MOREX v3, guanine (G) at a position corresponding to position 591505046 of reference genome MOREX v3, adenine (A) at a position corresponding to position 592578134 of reference genome MOREX v3, and cytosine (C) at a position corresponding to position 592849403 of reference genome MOREX v3;
[0754] (VII) adenine (A) at a position corresponding to position 573789473 of reference genome MOREX v3, guanine (G) at a position corresponding to position 577673982 of reference genome MOREX v3, guanine (G) at a position corresponding to position 591505046 of reference genome MOREX v3, adenine (A) at a position corresponding to position 592578134 of reference genome MOREX v3, and cytosine (C) at a position corresponding to position 592849403 of reference genome MOREX v3;
[0755] (VIII) adenine (A) at a position corresponding to position 573789473 of reference genome MOREX v3, guanine (G) at a position corresponding to position 577673982 of reference genome MOREX v3, thymine (T) at a position corresponding to position 591505046 of reference genome MOREX v3, adenine (A) at a position corresponding to position 592578134 of reference genome MOREX v3, and cytosine (C) at a position corresponding to position 592849403 of reference genome MOREX v3;
[0756] (IX) adenine (A) at a position corresponding to position 573789473 of reference genome MOREX v3, guanine (G) at a position corresponding to position 577673982 of reference genome MOREX v3, thymine (T) at a position corresponding to position 591505046 of reference genome MOREX v3, guanine (G) at a position corresponding to position 592578134 of reference genome MOREX v3, and cytosine (C) at a position corresponding to position 592849403 of reference genome MOREX v3;
[0757] (X) thymine (T) at position 591505046 with reference to genome MOREX v3, guanine (G) at position 592578134 with reference to genome MOREX v3, and thymine (T) at position 592849403 with reference to genome MOREX v3; or
[0758] (XI) guanine (G) at position 591505046 with reference to genome MOREX v3, adenine (A) at position 592578134 with reference to genome MOREX v3, and thymine (T) at position 592849403 with reference to genome MOREX v3.

[0759] Preferably, said resistance locus has
[0760] a) the nucleotide sequence having SEQ ID NO: 1,
[0761] b) a nucleotide sequence hybridizing with the nucleotide sequence of a) or a complement thereof or a reverse complement thereof under stringent conditions,
[0762] c) a nucleotide sequence having an identity of at least 90% to the nucleotide sequence of a).

[0763] In an aspect, the invention relates to a method for generating, producing, or obtaining a barley plant or plant part, comprising introducing in a barley plant or plant part a polynucleic acid, QTL, gene, molecular marker, locus, or SNP according to the invention as described herein.

[0764] In an aspect, the invention relates to a method for generating, producing, or obtaining a barley plant or plant part having (improved) BYDV and/or insect resistance, comprising introducing in a barley plant or plant part a polynucleic acid, QTL, gene, molecular marker, locus, or SNP according to the invention as described herein.

[0765] In an aspect, the invention relates to a method for generating, producing, or obtaining a barley plant or plant part, comprising introducing in a barley plant or plant part a polynucleic acid allele, QTL allele, gene allele, molecular marker allele, locus allele, or SNP allele according to the invention as described herein.

[0766] In an aspect, the invention relates to a method for generating, producing, or obtaining a barley plant or plant part having (improved) BYDV and/or insect resistance, comprising introducing in a barley plant or plant part a polynucleic acid allele, QTL allele, gene allele, molecular marker allele, locus allele, or SNP allele according to the invention as described herein.

[0767] In certain embodiments, introducing in (the genome of) a plant or plant part comprised introgression.

[0768] In certain embodiments, such methods comprise (a) providing a first barley plant having the polynucleic acid (allele), molecular marker (allele), locus (allele), QTL (allele), gene (allele), or SNP (allele), (b) crossing said first plant with a second barley, and (c) selecting progeny plants or plant parts having the polynucleic acid, molecular marker allele, locus, gene, QTL, or SNP.

[0769] In certain embodiments, introducing in (the genome of) a plant or plant part comprises gene-editing.

[0770] In certain embodiments, introducing in (the genome of) a plant or plant part comprises transgenesis.

[0771] In certain embodiments, introducing in (the genome of) a plant or plant part comprises transformation.

[0772] In certain embodiments, introducing in (the genome of) a plant or plant part comprises mutagenesis.

[0773] It will be understood that while the locus/QTL of the present invention originates from Hordeum bulbosum, it can be introduced in Hordeum vulgare or alternatively in any other species from the Hordeum genus.

[0774] In certain embodiments, the methods for generating, producing, or obtaining a plant or plant part comprise harvesting a plant part (such as a seed resulting from a cross between a first and second plan). In certain embodiments, the methods for generating, producing, or obtaining a plant or plant part comprise harvesting a plant part from the progeny plants.

[0775] In certain embodiments, the methods for generating, producing, or obtaining a plant or plant part comprise transforming a plant or plant part, preferably a plant cell, more preferably an immature or mature embryo, an inflorescence, a protoplast or callus, with said polynucleic acid, locus, gene(s), molecular marker allele, QTL, SNP, or haplotype, and optionally regenerating a plant from said plant cell, preferably immature or mature embryo, inflorescence, protoplast or callus.

[0776] In certain embodiments, the Barley Yellow Dwarf Virus (BYDV) and/or insect resistance gene or Ryd4Hb gene as described herein has
[0777] (1) a genomic sequence of HORVU.MOREX.r2.3HG0265710, HORVU.MOREX.r2.3HG0265660, HORVU.MOREX.r2.3HG0265670, HORVU.MOREX.r2.3HG0265690, or HORVU.MOREX.r2.3HG0265720; or a sequence which is at least at least 90%, preferably at least 95%, identical to a genomic sequence of HORVU.MOREX.r2.3HG0265710, HORVU.MOREX.r2.3HG0265660, HORVU.MOREX.r2.3HG0265670, HORVU.MOREX.r2.3HG0265690, or HORVU.MOREX.r2.3HG0265720;
[0778] (2) a coding sequence of HORVU.MOREX.r2.3HG0265710, HORVU.MOREX.r2.3HG0265660, HORVU.MOREX.r2.3HG0265670, HORVU.MOREX.r2.3HG0265690, or HORVU.MOREX.r2.3HG0265720, or a coding sequence which is at least 90%, preferably at least 95%, identical to a coding sequence of HORVU.MOREX.r2.3HG0265710, HORVU.MOREX.r2.3HG0265660, HORVU.MOREX.r2.3HG0265670, HORVU.MOREX.r2.3HG0265690, or HORVU.MOREX.r2.3HG0265720;
[0779] (3) a sequence encoding a HORVU.MOREX.r2.3HG0265710, HORVU.MOREX.r2.3HG0265660, HORVU.MOREX.r2.3HG0265670, HORVU.MOREX.r2.3HG0265690, or HORVU.MOREX.r2.3HG0265720 protein; or encoding a protein having a sequence which is at least 90%, preferably at least 95%, identical to a protein sequence of HORVU.MOREX.r2.3HG0265710, HORVU.MOREX.r2.3HG0265660, HORVU.MOREX.r2.3HG0265670, HORVU.MOREX.r2.3HG0265690, or HORVU.MOREX.r2.3HG0265720; and/or
[0780] (4) a sequence hybridizing with the sequence of (1), (2), and/or (3) or a complement thereof or a reverse complement thereof (under stringent conditions); or
[0781] (5) a nucleotide sequence encoding a protein derived from the amino acid sequence encoded by the nucleotide sequence of (1) to (4) by way of substitution, deletion and/or addition of one or more amino acid(s).

[0782] In certain embodiments, the Barley Yellow Dwarf Virus (BYDV) and/or insect resistance gene or Ryd4Hb gene as described herein has
[0783] (1) a genomic sequence of HORVU.MOREX.r2.3HG0265710; or a genomic sequence having a sequence which is at least 80%, preferably at least 90%, more preferably at least 95%, identical to a genomic sequence of HORVU.MOREX.r2.3HG0265710;
[0784] (2) a coding sequence of HORVU.MOREX.r2.3HG0265710 (SEQ ID NO: 2), or a coding sequence having a sequence which is at least 80%, preferably at least 90%, more preferably at least 95%, identical to a coding sequence of HORVU.MOREX.r2.3HG0265710 (SEQ ID NO: 2);
[0785] (3) a sequence encoding a HORVU.MOREX.r2.3HG0265710 protein; or encoding a protein having a sequence which is at least 80%, preferably at least 90%, more preferably at least 95%, identical to a HORVU.MOREX.r2.3HG0265710 protein sequence;
[0786] (4) a sequence hybridizing with the sequence of (1), (2), and/or (3) or a complement thereof or a reverse complement thereof (under stringent conditions); or
[0787] (5) a nucleotide sequence encoding a protein derived from the amino acid sequence encoded by the nucleotide sequence of (1) to (4) by way of substitution, deletion and/or addition of one or more amino acid(s).

[0788] In certain embodiments, the Barley Yellow Dwarf Virus (BYDV) and/or insect resistance gene or Ryd4Hb gene as described herein has
[0789] (1) a genomic sequence of HORVU.MOREX.r2.3HG0265660; or a genomic sequence having a sequence which is at least 80%, preferably at least 90%, more preferably at least 95%, identical to a genomic sequence of HORVU.MOREX.r2.3HG0265660;
[0790] (2) a coding sequence of HORVU.MOREX.r2.3HG0265660, or a coding sequence having a sequence which is at least 80%, preferably at least 90%, more preferably at least 95%, identical to a coding sequence of HORVU.MOREX.r2.3HG0265660; and/or
[0791] (3) a sequence encoding a HORVU.MOREX.r2.3HG0265660 protein; or encoding a protein having a sequence which is at least 80%, preferably at least 90%, more preferably at least 95%, identical to a HORVU.MOREX.r2.3HG0265660 protein sequence;
[0792] (4) a sequence hybridizing with the sequence of (1), (2), and/or (3) or a complement thereof or a reverse complement thereof (under stringent conditions); or
[0793] (5) a nucleotide sequence encoding a protein derived from the amino acid sequence encoded by the nucleotide sequence of (1) to (4) by way of substitution, deletion and/or addition of one or more amino acid(s).

[0794] In certain embodiments, the Barley Yellow Dwarf Virus (BYDV) and/or insect resistance gene or Ryd4Hb gene as described herein has
[0795] (1) a genomic sequence of HORVU.MOREX.r2.3HG0265670; or a genomic sequence having a sequence which is at least 80%, preferably at least 90%, more preferably at least 95%, identical to a genomic sequence of HORVU.MOREX.r2.3HG0265670;
[0796] (2) a coding sequence of HORVU.MOREX.r2.3HG0265670, or a coding sequence having a sequence which is at least 80%, preferably at least 90%, more preferably at least 95%, identical to a coding sequence of HORVU.MOREX.r2.3HG0265670; and/or
[0797] (3) a sequence encoding a HORVU.MOREX.r2.3HG0265670 protein; or encoding a protein having a sequence which is at least 80%, preferably at least 90%, more preferably at least 95%, identical to a HORVU.MOREX.r2.3HG0265670 protein sequence;
[0798] (4) a sequence hybridizing with the sequence of (1), (2), and/or (3) or a complement thereof or a reverse complement thereof (under stringent conditions); or
[0799] (5) a nucleotide sequence encoding a protein derived from the amino acid sequence encoded by the nucleotide sequence of (1) to (4) by way of substitution, deletion and/or addition of one or more amino acid(s).

[0800] In certain embodiments, the Barley Yellow Dwarf Virus (BYDV) and/or insect resistance gene or Ryd4Hb gene as described herein has
[0801] (1) a genomic sequence of HORVU.MOREX.r2.3HG0265690; or a genomic sequence having a sequence which is at least 80%, preferably at least 90%, more preferably at least 95%, identical to a genomic sequence of HORVU.MOREX.r2.3HG0265690;
[0802] (2) a coding sequence of HORVU.MOREX.r2.3HG0265690, or a coding sequence having a sequence which is at least 80%, preferably at least 90%, more preferably at least 95%, identical to a coding sequence of HORVU.MOREX.r2.3HG0265690; and/or
[0803] (3) a sequence encoding a HORVU.MOREX.r2.3HG0265690 protein; or encoding a protein having a sequence which is at least 80%, preferably at least 90%, more preferably at least 95%, identical to a HORVU.MOREX.r2.3HG0265690 protein sequence;
[0804] (4) a sequence hybridizing with the sequence of (1), (2), and/or (3) or a complement thereof or a reverse complement thereof (under stringent conditions); or
[0805] (5) a nucleotide sequence encoding a protein derived from the amino acid sequence encoded by the nucleotide sequence of (1) to (4) by way of substitution, deletion and/or addition of one or more amino acid(s).

[0806] In certain embodiments, the Barley Yellow Dwarf Virus (BYDV) and/or insect resistance gene or Ryd4Hb gene as described herein has
[0807] (1) a genomic sequence of HORVU.MOREX.r2.3HG0265720; or a genomic sequence having a sequence which is at least 80%, preferably at least 90%, more preferably at least 95%, identical to a genomic sequence of HORVU.MOREX.r2.3HG0265720;
[0808] (2) a coding sequence of HORVU.MOREX.r2.3HG0265720, or a coding sequence having a sequence which is at least 80%, preferably at least 90%, more preferably at least 95%, identical to a coding sequence of HORVU.MOREX.r2.3HG0265720; and/or
[0809] (3) a sequence encoding a HORVU.MOREX.r2.3HG0265720 protein; or encoding a protein having a sequence which is at least 80%, preferably at least 90%, more preferably at least 95%, identical to a HORVU.MOREX.r2.3HG0265720 protein sequence;
[0810] (4) a sequence hybridizing with the sequence of (1), (2), and/or (3) or a complement thereof or a reverse complement thereof (under stringent conditions); or
[0811] (5) a nucleotide sequence encoding a protein derived from the amino acid sequence encoded by the nucleotide sequence of (1) to (4) by way of substitution, deletion and/or addition of one or more amino acid(s).

[0812] In a preferred embodiment, the Barley Yellow Dwarf Virus (BYDV) and/or insect resistance gene or Ryd4Hb gene as described herein has
[0813] (1) a genomic sequence of HORVU.MOREX.r2.3HG0265710; or a genomic sequence having a sequence which is at least 80%, preferably at least 90%, more preferably at least 95%, identical to a genomic sequence of HORVU.MOREX.r2.3HG0265710;
[0814] (2) a coding sequence of HORVU.MOREX.r2.3HG0265710 (SEQ ID NO: 2), or a coding sequence having a sequence which is at least 80%, preferably at least 90%, more preferably at least 95%, identical to a coding sequence of HORVU.MOREX.r2.3HG0265710 (SEQ ID NO: 2); and/or
[0815] (3) a sequence encoding a HORVU.MOREX.r2.3HG0265710 protein; or encoding a protein having a sequence which is at least 80%, preferably at least 90%, more preferably at least 95%, identical to a HORVU.MOREX.r2.3HG0265710 protein sequence;
[0816] (4) a sequence hybridizing with the sequence of (1), (2), and/or (3) or a complement thereof or a reverse complement thereof (under stringent conditions); or
[0817] (5) a nucleotide sequence encoding a protein derived from the amino acid sequence encoded by the nucleotide sequence of (1) to (4) by way of substitution, deletion and/or addition of one or more amino acid(s).

[0818] In a preferred embodiment, the Barley Yellow Dwarf Virus (BYDV) and/or insect resistance gene or Ryd4Hb gene as described herein has
[0819] (1) a coding sequence having a sequence as set forth in SEQ ID NO: 2, or a coding sequence having a sequence which is at least 80%, preferably at least 90%, more preferably at least 95%, identical to a sequence as set forth in SEQ ID NO: 2;
[0820] (2) a sequence hybridizing with the sequence of (1)) or a complement thereof or a reverse complement thereof (under stringent conditions); or
[0821] (3) a nucleotide sequence encoding a protein derived from the amino acid sequence encoded by the nucleotide sequence of (1) by way of substitution, deletion and/or addition of one or more amino acid(s).

[0822] In a preferred embodiment, the Barley Yellow Dwarf Virus (BYDV) and/or insect resistance gene or Ryd4Hb gene as described herein has a coding sequence having a sequence as set forth in SEQ ID NO: 2, or a coding sequence having a sequence which is at least 80%, preferably at least 90%, more preferably at least 95%, identical to a sequence as set forth in SEQ ID NO: 2.

[0823] Preferably, the Barley Yellow Dwarf Virus (BYDV) and/or insect resistance gene or Ryd4Hb gene as described herein is HORVU.MOREX.r2.3HG0265710, which preferably has a coding sequence as set forth in SEQ ID NO: 2, or a coding sequence having a sequence which is at least 80%, preferably at least 90%, more preferably at least 95%, identical to a sequence as set forth in SEQ ID NO: 2.

[0824] In an aspect the invention relates to a barley plant or plant part obtained or obtainable by the methods for generating, producing, or obtaining a barley plant or plant part according to the invention as described herein.

[0825] In an aspect the invention relates to a barley plant or plant part obtained or obtainable by the methods for generating, producing, or obtaining a barley plant or plant part according to the invention as described herein, wherein said barley plant or plant part has (improved) BYDV and/or insect resistance or tolerance.

[0826] In an aspect, the invention relates to a (isolated) polynucleic acid, QTL, locus, gene, or marker according to the invention as described herein, or a (unique) fragment thereof, the complement of any thereof, or the reverse complement of any thereof.

[0827] In an aspect, the invention relates to a (isolated) polynucleic acid allele, QTL allele, locus, gene, allele, or marker allele according to the invention as described herein, or a (unique) fragment thereof, the complement of any thereof, or the reverse complement of any thereof.

[0828] In an aspect, the invention relates to a (isolated) BYDV and/or insect resistance polynucleic acid allele, QTL allele, locus allele, gene allele, or marker allele according to the invention as described herein, or a (unique) fragment thereof, the complement of any thereof, or the reverse complement of any thereof.

[0829] Fragments preferably are (contiguous) fragments of at least 15, preferably at least 18, more preferably at least 20 (contiguous) nucleotides.

[0830] In certain embodiments, the polynucleic acid, QTL, or locus according to the invention as described herein is at most 10 Mbp. In certain embodiments, the polynucleic acid, QTL, or locus according to the invention as described herein is at most 5 Mbp. In certain embodiments, the polynucleic acid, QTL, or locus according to the invention as described herein is at most 2 Mbp. In certain embodiments, the polynucleic acid, QTL, or locus according to the invention as described herein is at most 1 Mbp. In certain embodiments, the polynucleic acid, QTL, or locus according to the invention as described herein is at most 500 kb. In certain embodiments, the polynucleic acid, QTL, or locus according to the invention as described herein is at most 100 kb. In certain embodiments, the polynucleic acid, QTL, or locus according to the invention as described herein is at most 10 cM. In certain embodiments, the polynucleic acid, QTL, or locus according to the invention as described herein is at most 5 cM. In certain embodiments, the polynucleic acid, QTL, or locus according to the invention as described herein is at most 2 cM. In certain embodiments, the polynucleic acid, QTL, or locus according to the invention as described herein is at most 1 cM. In certain embodiments, the polynucleic acid, QTL, or locus according to the invention as described herein is at most 0.5 cM. In certain embodiments, the polynucleic acid, QTL, or locus according to the invention as described herein is at most 0.1 cM.

[0831] In certain embodiments, the polynucleic acid, QTL, or locus according to the invention as described herein is at most 1 Mbp. In certain embodiments, the polynucleic acid, QTL, or locus according to the invention as described herein is at most 0.5 Mbp. In certain embodiments, the polynucleic acid, QTL, or locus according to the invention as described herein is at most 0.2 Mbp.

[0832] In certain embodiments, the molecular marker or polynucleic acid according to the invention as described herein comprises at most 500 nucleotides. In certain embodiments, the molecular marker or polynucleic acid according to the invention as described herein comprises at most 300 nucleotides. In certain embodiments, the molecular marker or polynucleic acid according to the invention as described herein comprises at most 100 nucleotides. In certain embodiments, the molecular marker or polynucleic acid according to the invention as described herein comprises at least 15 nucleotides. In certain embodiments, the molecular marker or polynucleic acid according to the invention as described herein comprises at least 18 nucleotides. In certain embodiments, the molecular marker or polynucleic acid according to the invention as described herein comprises at least 20 nucleotides. In certain embodiments, the molecular marker or polynucleic acid according to the invention as described herein comprises at least 50 nucleotides.

[0833] In certain embodiments, the molecular marker or polynucleic acid according to the invention as described herein comprises at most 500 nucleotides and at least 15 nucleotides. In certain embodiments, the molecular marker or polynucleic acid according to the invention as described herein comprises at most 300 nucleotides and at least 15 nucleotides. In certain embodiments, the molecular marker or polynucleic acid according to the invention as described herein comprises at most 100 nucleotides and at least 15 nucleotides.

[0834] In certain embodiments, the molecular marker or polynucleic acid according to the invention as described herein comprises at most 500 nucleotides and at least 18 nucleotides. In certain embodiments, the molecular marker or polynucleic acid according to the invention as described herein comprises at most 300 nucleotides and at least 18 nucleotides. In certain embodiments, the molecular marker or polynucleic acid according to the invention as described herein comprises at most 100 nucleotides and at least 18 nucleotides.

[0835] In certain embodiments, the molecular marker or polynucleic acid according to the invention as described herein comprises at most 500 nucleotides and at least 20 nucleotides. In certain embodiments, the molecular marker or polynucleic acid according to the invention as described herein comprises at most 300 nucleotides and at least 20 nucleotides. In certain embodiments, the molecular marker or polynucleic acid according to the invention as described herein comprises at most 100 nucleotides and at least 20 nucleotides.

[0836] In certain embodiments, the molecular marker or polynucleic acid according to the invention as described herein comprises at most 500 nucleotides and at least 50 nucleotides. In certain embodiments, the molecular marker or polynucleic acid according to the invention as described herein comprises at most 300 nucleotides and at least 50 nucleotides. In certain embodiments, the molecular marker or polynucleic acid according to the invention as described herein comprises at most 100 nucleotides and at least 50 nucleotides.

[0837] In an aspect, the invention relates to a (isolated) polynucleotide comprising a polynucleic acid, (molecular) marker (allele), resistance gene (allele), Ryd4Hb gene (allele) or coding sequence thereof, or SNP (allele) of the invention as described herein, the complement or the reverse complement thereof, or a (unique) fragment thereof.

[0838] Fragments are in particular suitable as molecular markers, such as diagnostic molecular markers, i.e. capable of discriminating between resistance and susceptible genotypes or phenotypes or being unique for resistance and susceptible genotypes or phenotypes, such as comprising SNPs.

[0839] Also combinations of SNPs are envisaged, such as to obtain a particular (resistance or susceptible) haplotype, such as described herein elsewhere.

[0840] In an aspect, the invention relates to a (isolated) polynucleic acid having a sequence (hybridizing with a sequence) as set forth in any of SEQ ID NOs: 1 to 13, or a (unique) fragment thereof, the complement thereof, or the reverse complement thereof, or a (unique) fragment thereof.

[0841] In an aspect, the invention relates to a (isolated) polynucleic acid having a sequence (hybridizing with a sequence) which is at least 80%, preferably at least 90%, more preferably at least 95%, identical to a sequence as set forth in any of SEQ ID NOs: 1 to 13, or a (unique) fragment thereof, the complement thereof, or the reverse complement thereof, or a (unique) fragment thereof, and comprising one or more of the respective (resistance or susceptible) SNPs of the invention.

[0842] In an aspect, the invention relates to a (isolated) polynucleic acid having a sequence (hybridizing with a sequence) as set forth in any of SEQ ID NOs: 2 to 13, or a (unique) fragment thereof, the complement thereof, or the reverse complement thereof, or a (unique) fragment thereof.

[0843] In an aspect, the invention relates to a (isolated) polynucleic acid having a sequence (hybridizing with a sequence) which is at least 80%, preferably at least 90%, more preferably at least 95%, identical to a sequence as set forth in any of SEQ ID NOs: 2 to 13, or a (unique) fragment thereof, the complement thereof, or the reverse complement thereof, or a (unique) fragment thereof, and comprising one or more of the respective (resistance or susceptible) SNPs of the invention.

[0844] In an aspect, the invention relates to a (isolated) polynucleic acid having a sequence (hybridizing with a sequence) as set forth in any of SEQ ID NOs: 3 to 13, or a (unique) fragment thereof, the complement thereof, or the reverse complement thereof, or a (unique) fragment thereof.

[0845] In an aspect, the invention relates to a (isolated) polynucleic acid having a sequence (hybridizing with a sequence) which is at least 80%, preferably at least 90%, more preferably at least 95%, identical to a sequence as set forth in any of SEQ ID NOs: 3 to 13, or a (unique) fragment thereof, the complement thereof, or the reverse complement thereof, or a (unique) fragment thereof, and comprising one or more of the respective (resistance or susceptible) SNPs of the invention.

[0846] In an aspect, the invention relates to a (isolated) polynucleic acid having a sequence (hybridizing with a sequence) as set forth in any of SEQ ID NOs: 3 to 9, or a (unique) fragment thereof, the complement thereof, or the reverse complement thereof, or a (unique) fragment thereof.

[0847] In an aspect, the invention relates to a (isolated) polynucleic acid having a sequence (hybridizing with a sequence) which is at least 80%, preferably at least 90%, more preferably at least 95%, identical to a sequence as set forth in any of SEQ ID NOs: 3 to 9, or a (unique) fragment thereof, the complement thereof, or the reverse complement thereof, or a (unique) fragment thereof, and comprising one or more of the respective (resistance or susceptible) SNPs of the invention.

[0848] In an aspect, the invention relates to a (isolated) polynucleic acid having a sequence (hybridizing with a sequence) as set forth in SEQ ID NO: 1, or a (unique) fragment thereof, the complement thereof, or the reverse complement thereof, or a (unique) fragment thereof.

[0849] In certain embodiments, the (isolated) polynucleic acid is a fragment of SEQ ID NO: 1 comprising one or more or the (resistance or susceptible) molecular markers, genes, or SNPs of the invention as described herein.

[0850] In an aspect, the invention relates to a (isolated) polynucleic acid having a sequence (hybridizing with a sequence) as set forth in any of SEQ ID NOs: 2, or a (unique) fragment thereof, the complement thereof, or the reverse complement thereof, or a (unique) fragment thereof.

[0851] In an aspect, the invention relates to a (isolated) polynucleic acid having a sequence (hybridizing with a sequence) which is at least 80%, preferably at least 90%, more preferably at least 95%, identical to a sequence as set forth in any of SEQ ID NOs: 2, or a (unique) fragment thereof, the complement thereof, or the reverse complement thereof, or a (unique) fragment thereof.

[0852] In an aspect, the invention relates to a (isolated) polynucleic acid having a sequence (hybridizing with a sequence) which is at least 90%, preferably at least 95%, more preferably at least 98% identical to a sequence as set forth in of SEQ ID NO: 1, the complement thereof, or the reverse complement thereof, and comprising the indicated (resistance or susceptible) SNP (allele) or haplotype.

[0853] In an aspect, the invention relates to a (isolated) polynucleic acid having a sequence (hybridizing with a sequence) as set forth in any of SEQ ID NOs: 3 to 9, or a (unique) fragment thereof, the complement thereof, or the reverse complement thereof, or a (unique) fragment thereof.

[0854] In an aspect, the invention relates to a (isolated) polynucleic acid having a sequence (hybridizing with a sequence) which is at least 90%, preferably at least 95%, more preferably at least 98% identical to a sequence as set forth in any of SEQ ID NOs: 3 to 9, the complement thereof, or the reverse complement thereof, and comprising the indicated (resistance or susceptible) SNP (allele).

[0855] In certain embodiments, the polynucleic acids having a sequence of any of SEQ ID NOs: 1 or 3 to 9 (or the variants having at least 90%, 95%, or 98% sequence identity, or the fragments thereof) comprise the respective resistance SNP allele, as described herein elsewhere.

[0856] In certain embodiments, the polynucleic acids having a sequence of any of SEQ ID NOs: 1 or 3 to 9 (or the variants having at least 90%, 95%, or 98% sequence identity, or the fragments thereof) lack the respective resistance SNP allele, as described herein elsewhere.

[0857] In certain embodiments, the polynucleic acids having a sequence of any of SEQ ID NOs: 1 or 3 to 9 (or the variants having at least 90%, 95%, or 98% sequence identity, or the fragments thereof) comprise the respective susceptibility SNP allele, as described herein elsewhere.

[0858] In certain embodiments, the polynucleotide, locus, QTL, gene, confers BYDV and/or insect resistance.

[0859] In an aspect, the invention relates to the complement or reverse complement of the polynucleotide of the invention as described herein.

[0860] In an aspect, the invention relates to a polynucleic acid specifically hybridizing with the polynucleotide of the invention as described herein.

[0861] In an aspect, the invention relates to a polynucleic acid specifically hybridizing with the complement or reverse complement of the polynucleotide of the invention as described herein.

[0862] In certain embodiments, the polynucleic acid of the invention as described herein is a primer or a probe. In certain embodiments, the polynucleic acid of the invention as described herein is a primer. In certain embodiments, the polynucleic acid of the invention as described herein is a probe. In certain embodiments, the polynucleic acid of the invention as described herein is an allele-specific primer or a probe. In certain embodiments, the polynucleic acid of the invention as described herein is an allele-specific primer. In certain embodiments, the polynucleic acid of the invention as described herein is an allele-specific probe. In certain embodiments, the polynucleic acid of the invention as described herein is a KASP primer.

[0863] In an aspect, the invention relates to a primer or probe capable of specifically detecting the polynucleic acid (allele), QTL (allele), locus (allele), gene (allele), molecular marker (allele), or SNP (allele) according to the invention as described herein.

[0864] In an aspect, the invention relates to a primer or probe capable of specifically detecting the polynucleic acid allele, QTL allele, locus allele, gene allele, molecular marker allele, or SNP allele according to the invention as described herein.

[0865] In an aspect, the invention relates to a primer or probe capable of specifically detecting the resistance polynucleic acid allele, QTL allele, locus allele, gene allele, molecular marker allele, or SNP allele according to the invention as described herein.

[0866] In an aspect, the invention relates to a primer or probe capable of specifically detecting the susceptibility polynucleic acid allele, QTL allele, locus allele, gene allele, molecular marker allele, or SNP allele according to the invention as described herein.

[0867] In an aspect, the invention relates to an allele-specific primer or probe capable of specifically detecting the polynucleic acid (allele), QTL (allele), locus (allele), gene (allele), molecular marker (allele), or SNP (allele) according to the invention as described herein.

[0868] In an aspect, the invention relates to an allele-specific primer or probe capable of specifically detecting the polynucleic acid allele, QTL allele, locus allele, gene allele, molecular marker allele, or SNP allele according to the invention as described herein.

[0869] In an aspect, the invention relates to an allele-specific primer or probe capable of specifically detecting the resistance polynucleic acid allele, QTL allele, locus allele, gene allele, molecular marker allele, or SNP allele according to the invention as described herein.

[0870] In an aspect, the invention relates to an allele-specific primer or probe capable of specifically detecting the susceptibility polynucleic acid allele, QTL allele, locus allele, gene allele, molecular marker allele, or SNP allele according to the invention as described herein.

[0871] In an aspect, the invention relates to a (allele-specific) primer capable of specifically detecting the polynucleic acid (allele), QTL (allele), locus (allele), gene (allele), molecular marker (allele), or SNP (allele) according to the invention as described herein.

[0872] In an aspect, the invention relates to a (allele-specific) primer capable of specifically detecting the polynucleic acid allele, QTL allele, locus allele, gene allele, molecular marker allele, or SNP allele according to the invention as described herein.

[0873] In an aspect, the invention relates to a (allele-specific) primer capable of specifically detecting the resistance polynucleic acid allele, QTL allele, locus allele, gene allele, molecular marker allele, or SNP allele according to the invention as described herein.

[0874] In an aspect, the invention relates to a (allele-specific) primer capable of specifically detecting the susceptibility polynucleic acid allele, QTL allele, locus allele, gene allele, molecular marker allele, or SNP allele according to the invention as described herein.

[0875] In certain embodiments, the primer comprises at least 15, preferably at least 18, more preferably at least contiguous 20 nucleotides of SEQ ID NO: 3, and comprising the indicated SNP (as also provided in Table 3), the complement or reverse complement thereof, preferably wherein said SNP is the most 3′ nucleotide, the second most 3′ nucleotide or the third most 3′ nucleotide, preferably the most 3′ nucleotide. In certain embodiments, the primer comprises at least 15, preferably at least 18, more preferably at least contiguous 20 nucleotides of SEQ ID NO: 4, and comprising the indicated SNP (as also provided in Table 3), the complement or reverse complement thereof, preferably wherein said SNP is the most 3′ nucleotide, the second most 3′ nucleotide or the third most 3′ nucleotide, preferably the most 3′ nucleotide. In certain embodiments, the primer comprises at least 15, preferably at least 18, more preferably at least contiguous 20 nucleotides of SEQ ID NO: 5, and comprising the indicated SNP (as also provided in Table 3), the complement or reverse complement thereof, preferably wherein said SNP is the most 3′ nucleotide, the second most 3′ nucleotide or the third most 3′ nucleotide, preferably the most 3′ nucleotide. In certain embodiments, the primer comprises at least 15, preferably at least 18, more preferably at least contiguous 20 nucleotides of SEQ ID NO: 6, and comprising the indicated SNP (as also provided in Table 3), the complement or reverse complement thereof, preferably wherein said SNP is the most 3′ nucleotide, the second most 3′ nucleotide or the third most 3′ nucleotide, preferably the most 3′ nucleotide. In certain embodiments, the primer comprises at least 15, preferably at least 18, more preferably at least contiguous 20 nucleotides of SEQ ID NO: 7, and comprising the indicated SNP (as also provided in Table 3), the complement or reverse complement thereof, preferably wherein said SNP is the most 3′ nucleotide, the second most 3′ nucleotide or the third most 3′ nucleotide, preferably the most 3′ nucleotide. In certain embodiments, the primer comprises at least 15, preferably at least 18, more preferably at least contiguous 20 nucleotides of SEQ ID NO: 8, and comprising the indicated SNP (as also provided in Table 3), the complement or reverse complement thereof, preferably wherein said SNP is the most 3′ nucleotide, the second most 3′ nucleotide or the third most 3′ nucleotide, preferably the most 3′ nucleotide. In certain embodiments, the primer comprises at least 15, preferably at least 18, more preferably at least contiguous 20 nucleotides of SEQ ID NO: 9, and comprising the indicated SNP (as also provided in Table 3), the complement or reverse complement thereof, preferably wherein said SNP is the most 3′ nucleotide, the second most 3′ nucleotide or the third most 3′ nucleotide, preferably the most 3′ nucleotide.

[0876] In an aspect, the invention relates to a primer set capable of specifically detecting the (resistance and/or susceptibility) polynucleic acid allele, QTL allele, locus allele, gene allele, molecular marker allele, or SNP allele according to the invention as described herein.

[0877] In certain embodiments, the primer set comprises at least a first primer and a second primer, both of which preferably are allele-specific primers. One primer may detect the resistance polynucleic acid allele, QTL allele, locus allele, gene allele, molecular marker allele, or SNP allele according to the invention as described herein, and the other primer may detect the susceptibility polynucleic acid allele, QTL allele, locus allele, gene allele, molecular marker allele, or SNP allele according to the invention as described herein.

[0878] In certain embodiments, the primer set comprises a third primer (in reverse orientation). In certain embodiments, the third primer is configured to allow amplification of a polynucleic acid in combination with said first or second primer.

[0879] In an aspect, the invention relates to the use of a polynucleic acid, QTL, locus, gene, marker, or SNP according to the invention as described herein for identifying and/or selecting a barley plant or plant part.

[0880] In an aspect, the invention relates to the use of a polynucleic acid allele, QTL allele, locus allele, gene allele, marker allele, or SNP allele according to the invention as described herein for identifying and/or selecting a barley plant or plant part having (increased) BYDV and/or insect resistance and/or tolerance.

[0881] In an aspect, the invention relates to the use of a polynucleic acid allele, QTL allele, locus allele, gene allele, marker allele, or SNP allele according to the invention as described herein for identifying and/or selecting a barley plant or plant part having (increased) BYDV and/or insect resistance and/or tolerance compared to a barley plant or plant part of the Brassicaceae family not having said polynucleotide, molecular marker (allele), locus (allele), gene (allele), QTL (allele), or SNP (allele) of the invention (e.g. a reference or (near) isogenic line lacking the resistance allele).

[0882] In an aspect, the invention relates to the use of a polynucleic acid, QTL, locus, gene(s), marker, or SNP according to the invention as described herein for generating, producing, or obtaining a barley plant or plant part.

[0883] In an aspect, the invention relates to the use of a polynucleic acid allele, QTL allele, locus allele, gene allele, marker allele, or SNP allele according to the invention as described herein for generating, producing, or obtaining a barley plant or plant part having (increased) BYDV and/or insect resistance and/or tolerance.

[0884] In an aspect, the invention relates to the use of a polynucleic acid allele, QTL allele, locus allele, gene allele, marker allele, or SNP allele according to the invention as described herein for generating, producing, or obtaining a barley plant or plant part having (increased) BYDV and/or insect resistance and/or tolerance, compared to a barley plant or plant part not having said polynucleotide, molecular marker (allele), locus (allele), gene (allele), QTL (allele), or SNP (allele) of the invention.

[0885] The present invention is not to be limited in scope by the specific embodiments described herein. Indeed, various modifications of the invention in addition to those described herein will become apparent to those skilled in the art from the foregoing description and the accompanying figures. Such modifications are intended to fall under the scope of the appended claims. It is further to be understood that all values may include approximates and are provided for description.

[0886] The aspects and embodiments of the invention are further supported by the following non-limiting examples. The following examples, including the experiments conducted and the results achieved, are provided for illustrative purposes only and are not constructed as limiting the present invention. The use of these and other examples anywhere in the specification is illustrative only and in no way limits the scope and meaning of the invention or of any exemplified term. Likewise, the invention is not limited to any particular preferred embodiments described here. Indeed, many modifications and variations of the invention may be apparent to those skilled in the art upon reading this specification, and such variations can be made without departing from the invention in spirit or in scope. The invention is therefore to be limited only by the terms of the appended claims along with the full scope of equivalents to which those claims are entitled.

### EXAMPLES

### Example 1

[0887] In order to fine map Ryd4Hb, two populations were developed, using two different H. bulbosum introgressions in H. vulgare (Hv) background. An interval of 13.7 cM had been defined in an earlier study. The genetic interval could be translated now into a precise physical interval, considering the H. vulgare reference genome sequence (Monat et al. 2019). This process involved the development of genetic markers to screen the populations for recombination events in the proximity of the resistance gene Ryd4Hb.

[0888] Using exome capture, SNPs specific to the H. bulbosum introgression at the Ryd4Hb locus could be identified and converted into specific markers. They were used to design markers (Table 3). Suitable primers for CAPS analysis for some of the markers are provided in Table 4

TABLE 3
Markers. Diagnostic SNPs are indicated between square brackets [ ]. SNP
positions are indicated with reference to the Hordeum vulgare reference
genome Morex v3

| | SNP | | SEQ |
|---|---|---|---|
| Name | position | Sequence | ID NO |
| ge51829s01 | 573789473 | AATGGATGCATATCCCAGGGACCTTCCACCGCAC | 3 |
| | | GGGGCCACCCCGRCGTTGCGCGTCGTCCATCCC | |
| | | CATGTACACTCGCCACTCCTTCATYAGGTTCCC | |
| | | [A/G]AGGTCATGSAGCTTGGCTGCGAGGCCGACGC | |
| | | AACAATTGGCGTGCATGGTGTAGAGCGTGTTGAA | |
| | | GTCCCGGGTGTTGTTGCAGAACCCGGCATTGTG | |
| | | CA | |
| ge51835s01 | 577673982 | GTGCTCTCTTTTAATCCGGAGTCTCGAAAAGTTTC | 4 |
| | | AAACACCATCTGTGCTTAGCTTATATACCCCTTGT | |
| | | TGTCTTTTTTTCTYGTCATGGTGAAGATCA[G/C]TA | |
| | | GCCACTGTTATCAGCAGAAGTGGTGGTGTACTGG | |
| | | TTTTGGGGATATATTCCGCTGTGTAGAATTTTTGG | |
| | | GCAAGCTGCATGCCATTTGTACGAATTTA | |
| ge45688s01 | 591505046 | CAGGTGTTCATGCTCCCTGACATCAGATCGGATA | 5 |
| | | GTTGGTCCATTGAACAGTGCTTCCATCGCTTCAG | |
| | | CTGCCATTTGAGTATTTGGCCCAATATGATAT[T/G] | |
| | | CTGCATATGAATCATCGGTAGCACCAACTGGTTC | |
| | | TGGTTTCTTAATACAGTTCATGCCCAGGTCCTCAT | |
| | | CAATACAGTCTAGCATAGCACCAACTGATGT | |
| ge45691s01 | 592578134 | CATCGTCGGTGTGCTGGCAAGAGAAGGCCGCCT | 6 |
| | | CATCATGGACGAACATCTTGAGGCCCTCGATGAG | |
| | | GAACGTAGAGAACTCCTTGGTGCCCTCGATCTG | |
| | | [G/A]GTCGGTGTAGCCGTACCTCGCCACGCACCG | |
| | | GAACATGCGGTGCTCGGCGGGGCCGACCCTGC | |
| | | GGAAGATGAAGCGCTCCGGCAGCGCCACCCGC | |
| | | GGGATGG | |
| ge45717s01 | 592685940 | TTGTCGAGCTGSAGCTTCAGGAGAACATGCTKAC | 7 |
| | | YGGMRTGGTGCCGCTGGAGGT[T/C]CTCTCTCTT | |
| | | GTTCTTGTSGGGGACTTGACTGAACTGTGAGTAG | |
| | | TGCARTTTGANTCACA | |
| ge45718s01 | 592752433 | TTCTCYTCYTTYTGGATTTAATTAGGRTAYATGCT | 8 |
| | | TCCATTCCTGTCAATTGAGAC[G/T]GCCTGATAAC | |
| | | ACTGCATTTCCCTTGGTGTTTTGATTTGTCCTTCT | |
| | | TCTGCAACAKAC | |
| ge45719s01 | 592849403 | ATCTCAGCCGGGCCCTTCCTGTTCTCGTTGAACA | 9 |
| | | TGGCGAACACGTAGGC[C/T]TCGATGGCGCCGGG | |
| | | CCTCTTGGGCGTCCCCTGCCCGRCATGGATATG | |
| | | TTT | |

TABLE 4
Primers and restriction enzyme for CAPS analysis

| | | | | size in | size in |
|---|---|---|---|---|---|
| Name | Enzyme | Primer F | Primer R | Hv (bp) | Hb (bp) |
| ge45717s01 | PpuMI | TACGACAACCATTT | CGTGTCCTGGATGAC | 581 | 280 + 300 |
| | | CACCGG (SEQ ID | CGTAG (SEQ ID NO: | | |
| | | NO: 10) | 11) | | |
| ge45718s01 | BbsI | AGCAAGTTTGAGCT | AGCAAAGTAGAGCAG | 198 + 208 | 406 |
| | | CGGTGA (SEQ ID | GCACC (SEQ ID NO: | | |
| | | NO: 12) | 13) | | |

[0889] The lethality factor surprisingly segregated in the first population. KASP markers were used to screen for recombination at Ryd4Hb locus in a total of 6,007 plants from this first population. Thirty-three non-lethal recombinants were identified.

[0890] The resistant parent from the second population is the BC2 5215 (3HL) introgression line is fixed for the H. vulgare allele at the lethal factor locus, hence the lethality factor was removed. A total of 10,218 plants from this population were screened. 71 recombinants in this interval were retrieved.

[0891] Recombinants from both populations were genotyped with the KASP markers in the Ryd4Hb interval (ge45719s01, ge45717s01and ge45718s01.

[0892] Phenotyping of the resistance was carried out. All 33 recombinants from the first population were phenotyped. Based on these results, focused phenotyping was performed for 23 recombinants identified in the second population. The gene Ryd4Hb was allocated between markers ge45717s01 and ge45718s01. This interval consists of 66.5 kb based on the reference genome of H. vulgare ‘Morex’ v3 (chromosome 3H position 592685940 to position 592752433). This interval is orthologous to the region in Triticum monococcum, carrying the stem rust resistance gene Sr35. This gene is effective against the very aggressive Ug99 race (Saintenac et al. 2013). The same genetic interval was identified in barley to carry the barley leaf rust resistance gene Rph13 (Jost et al 2020). The interval is annotated to contain five high confidence genes (FIG. 3). The best candidate gene for Ryd4Hb is HORVU.MOREX.r2.3HG0265710 (having a Morex v2 reference coding sequence as set forth in SEQ ID NO: 2). The corresponding H. Bulbosum (genomic or coding) sequence can be derived from SEQ ID NO: 1. It represents the only complete NLR gene annotated at this locus in the Morex reference genome (Monat et al. 2019) and in Morex it represents the best homolog to Sr35 of T. monococcum.

[0893] The structural variation of this interval in barley was studied on the basis of 20 unpublished chromosome-scale genome assemblies. NLR loci were annotated using a combination of NCBI conserved domains (Lu et al. 2020), NLR-Annotator (Steuernagel et al. 2020), BLAST against known loci and manual curation. In these 20 genomes, the size of the interval varied between 67.7 kb in HOR 9043 and 604.9 kb in Akashirinki (FIG. 4). Ten different NLR composition classes for the Ryd4Hb locus (FIG. 2) was retrieved including multiple duplications of the Sr35 homolog gene. These results indicate that the locus is prone to extensive structural variation even within H. vulgare, the genome structure of this locus in the H. bulbosum genome can be derived by additional analysis. These results further provide hints that H. bulbosum also carries an Sr35 homolog at conserved colinear position, providing an excellent candidate gene for Ryd4Hb.

[0894] Based on the very close proximity between the markers designed in this study and the gene of resistance, ge45717s01, ge45718s01 but also ge45719s01 can be used as diagnostic markers in a method for identifying a H. vulgare plant comprising the resistance gene.

[0895] Moreover, plant material with a reduced H. bulbosum introgression fragment have been identified (FIG. 5) and recombinant inbred lines (RILs) have been developed with the most promising being EP_16-267_11_378 and EP_16-271_3_206.

[0896] Phenotypic data (filed trial) on BYDV resistance are provided in Table 5.

TABLE 5
Phenotypic data on BYDV resistance for indicated crosses. BC5215 is the donor (i.e resistant) parent plant.

| | SNP identity | | | | | |
|---|---|---|---|---|---|---|
| Cross | ge45688s01 | ge45691s01 | ge45717s01 | ge45718s01 | ge45719s01 | BYDV |
| BC5215 × KWS Keeper/× | G | A | T | G | C | susceptible |
| KW 6-440//× KW 6-1664 | | | | | | |
| BC5215 × KWS Keeper/× | G | A | T | G | C | susceptible |
| KW 6-440//× KW 6-1664 | | | | | | |
| BC5215 × KWS Keeper/× | G | A | T | G | C | susceptible |
| KW 6-440//× KW 6-1664 | | | | | | |
| BC5215 × KWS Keeper/× | G | A | T | G | C | susceptible |
| KW 6-440//× KW 6-1664 | | | | | | |
| BC5215 × KWS Keeper/× | G | A | T | G | C | susceptible |
| KW 6-440//× KW 6-1664 | | | | | | |
| BC5215 × KW 6-237/× | G | A | C | T | T | Resistant |
| KWS Astaire//× G1009/ | | | | | | |
| 16Rph/Rym16 | | | | | | |
| BC5215 × KW 6-237/× | G | A | C | T | T | Resistant |
| KWS Astaire//× G1009/ | | | | | | |
| 16Rph/Rym16 | | | | | | |
| BC5215 × KW 6-237/× | G | A | C | T | T | Resistant |
| KWS Astaire//× G1009/ | | | | | | |
| 16Rph/Rym16 | | | | | | |
| BC5215 × KW 6-237/× | G | A | C | T | T | Resistant |
| KWS Astaire//× G1009/ | | | | | | |
| 16Rph/Rym16 | | | | | | |
| BC5215 × KW 6-237/× | G | A | C | T | T | Resistant |
| KWS Astaire//× G1009/ | | | | | | |
| 16Rph/Rym16 | | | | | | |
| Hickory × BC5215/× | G | A | T | G | C | susceptible |
| KW2-1523//× KW2-1535 | | | | | | |
| Hickory × BC5215/× | G | A | T | G | C | susceptible |
| KW2-1523//× KW2-1535 | | | | | | |
| Hickory × BC5215/× | G | A | T | G | C | susceptible |
| KW2-1523//× KW2-1535 | | | | | | |
| Hickory × BC5215/× | G | A | T | G | C | susceptible |
| KW2-1523//× KW2-1535 | | | | | | |
| Hickory × BC5215/× | G | A | T | G | C | susceptible |
| KW2-1523//× KW2-1535 | | | | | | |
| BC5215 × KW 6-237/× | G | A | C | T | T | Resistant |
| Astaire//× Rph1009/16///× | | | | | | |
| KWS Orbit | | | | | | |
| BC5215 × KW 6-237/× | G | A | C | T | T | Resistant |
| Astaire//× Rph1009/16///× | | | | | | |
| KWS Orbit | | | | | | |
| BC5215 × KW 6-237/× | G | A | C | T | T | Resistant |
| Astaire//× Rph1009/16///× | | | | | | |
| KWS Orbit | | | | | | |
| BC5215 × KW 6-237/× | G | A | C | T | T | Resistant |
| Astaire//× Rph1009/16///× | | | | | | |
| KWS Orbit | | | | | | |
| BC5215 × KW 6-237/× | G | A | C | T | T | Resistant |
| Astaire//× Rph1009/16///× | | | | | | |
| KWS Orbit | | | | | | |
| BC5215 × KW 6-237/× | G | A | C | T | T | Resistant |
| Astaire//× Rph1009/16///× | | | | | | |
| KWS Orbit | | | | | | |
| BC5215 × KW 6-237/× | G | A | C | T | T | Resistant |
| Astaire//× Rph1009/16///× | | | | | | |
| KWS Orbit | | | | | | |
| BC5215 × KW 6-237/× | G | A | C | T | T | Resistant |
| Astaire//× Rph1009/16///× | | | | | | |
| KWS Orbit | | | | | | |
| BC5215 × KW 6-237/× | G | A | C | T | T | Resistant |
| Astaire//× Rph1009/16///× | | | | | | |
| Higgins | | | | | | |
| BC5215 × KW 6-237/× | G | A | C | T | T | Resistant |
| Astaire//× Rph1009/16///× | | | | | | |
| Higgins | | | | | | |
| BC5215 × KW 6-237/× | G | A | C | T | T | Resistant |
| Astaire//× Rph1009/16///× | | | | | | |
| Higgins | | | | | | |
| BC5215 × KW 6-237/× | G | A | C | T | T | Resistant |
| Astaire//× Rph1009/16///× | | | | | | |
| KWS Orbit | G | A | C | T | T | Resistant |
| BC5215 × KW 6-237/× | | | | | | |
| Astaire//× Rph1009/16///× | G | A | C | T | T | Resistant |
| KWS Orbit | | | | | | |
| BC5215 × KW 6-237/× | G | A | C | T | T | Resistant |
| Astaire//× Rph1009/16///× | | | | | | |
| Higgins | | | | | | |
| BC5215 × KW 6-237/× | G | A | C | T | T | Resistant |
| Astaire//× Rph1009/16///× | | | | | | |
| Higgins | | | | | | |
| BC5215 × KW 6-237/× | G | A | C | T | T | Resistant |
| Astaire//× Rph1009/16///× | | | | | | |
| Higgins | | | | | | |
| BC5215 × KW 6-237/× | G | A | C | T | T | Resistant |
| Astaire//× Rph1009/16///× | | | | | | |
| Higgins | | | | | | |
| BC5215 × KW 6-237/× | G | A | C | T | T | Resistant |
| Astaire//× Rph1009/16///× | | | | | | |
| G1508/17UK Ram | | | | | | |
| BC5215 × KW 6-237/× | G | A | C | T | T | Resistant |
| Astaire//× Rph1009/16///× | | | | | | |
| G1508/17UK Ram | | | | | | |
| BC5215 × KW 6-237/× | G | A | C | T | T | Resistant |
| Astaire//× Rph1009/16///× | | | | | | |
| G1508/17UK Ram | | | | | | |
| BC5215 × KW 6-237/× | G | A | C | T | T | Resistant |
| Astaire//× Rph1009/16///× | | | | | | |
| G1508/17UK Ram | | | | | | |
| BC5215 × KW 6-237/× | G | A | C | T | T | Resistant |
| Astaire//× Rph1018/16///× | | | | | | |
| KW 6-1630 | | | | | | |
| BC5215 × KW 6-237/× | G | A | C | T | T | Resistant |
| Astaire//× Rph1018/16///× | | | | | | |
| KW 6-1630 | | | | | | |
| BC5215 × KW 6-237/× | G | A | C | T | T | Resistant |
| Astaire//× Rph1018/16///× | | | | | | |
| KW 6-1630 | | | | | | |
| BC5215 × KW 6-237/× | G | A | C | T | T | Resistant |
| Astaire//× Rph1018/16///× | | | | | | |
| KW 6-1630 | | | | | | |
| BC5215 × KW 6-237/× | G | A | C | T | T | Resistant |
| Astaire//× Rph1018/16///× | | | | | | |
| KW 6-1630 | | | | | | |
| BC5215 × KW 6-237/× | G | A | C | T | T | Resistant |
| Astaire//× Rph1018/16///× | | | | | | |
| KW 6-1630 | | | | | | |
| BC5215 × KW 6-237/× | G | A | C | T | T | Resistant |
| Astaire//× Rph1018/16///× | | | | | | |
| KW 6-1630 | | | | | | |
| BC5215 × KW 6-237/× | G | A | C | T | T | Resistant |
| Astaire//× Rph1009/16///× | | | | | | |
| KW 6-1630 | | | | | | |
| BC5215 × KW 6-237/× | G | A | C | T | T | Resistant |
| Astaire//× Rph1009/16///× | | | | | | |
| KW 6-1630 | | | | | | |
| BC5215 × KW 6-237/× | G | A | C | T | T | Resistant |
| Astaire//× Rph1009/16///× | | | | | | |
| KW 6-1630 | | | | | | |
| BC5215 × KW 6-237/× | G | A | C | T | T | Resistant |
| Astaire//× Rph1009/16///× | | | | | | |
| KW 6-1630 | | | | | | |
| BC5215 × KW 6-237/× | G | A | C | T | T | Resistant |
| Astaire//× Rph1009/16///× | | | | | | |
| Higgins | | | | | | |
| BC5215 × KW 6-237/× | G | A | C | T | T | Resistant |
| Astaire//× Rph1009/16///× | | | | | | |
| Higgins | | | | | | |
| BC5215 × KW 6-237/× | G | A | C | T | T | Resistant |
| Astaire//× Rph1009/16///× | | | | | | |
| Higgins | | | | | | |
| BC5215 × KW 6-237/× | G | A | C | T | T | Resistant |
| Astaire//× Rph1009/16///× | | | | | | |
| Higgins | | | | | | |
| BC5215 × KW 6-237/× | G | A | C | T | T | Resistant |
| Astaire//× Rph1018/16///× | | | | | | |
| KW 6-1630 | | | | | | |
| BC5215 × KW 6-237/× | G | A | C | T | T | Resistant |
| Astaire//× Rph1018/16///× | | | | | | |
| KW 6-1630 | | | | | | |
| BC5215 × KW 6-237/× | G | A | C | T | T | Resistant |
| Astaire//× Rph1018/16///× | | | | | | |
| KW 6-1630 | | | | | | |
| BC5215 × KW 6-237/× | G | A | C | T | T | Resistant |
| Astaire//× Rph1018/16///× | | | | | | |
| KW 6-1630 | | | | | | |
| Hickory × BC5215/× KWS | T | G | T | T | T | Resistant |
| Somerset//× KW 2-1535 | | | | | | |
| Hickory × BC5215/× KWS | T | G | T | T | T | Resistant |
| Somerset//× KW 2-1535 | | | | | | |
| Hickory × BC5215/× KWS | T | G | T | T | T | Resistant |
| Somerset//× KW 2-1535 | | | | | | |
| Hickory × BC5215/× KWS | T | G | T | T | T | Resistant |
| Somerset//× KW 2-1535 | | | | | | |
| Hickory × BC5215/× KWS | T | G | T | T | T | Resistant |
| Somerset//× KW 2-1535 | | | | | | |
| Hickory × BC5215/× KWS | T | G | T | T | T | Resistant |
| Somerset//× KW 2-1535 | | | | | | |
| Hickory × BC5215/× KWS | T | G | T | T | T | Resistant |
| Somerset//× KW 2-1535 | | | | | | |
| Hickory × BC5215/× KWS | T | G | T | T | T | Resistant |
| Somerset//× KW 2-1535 | | | | | | |
| Hickory × BC5215/× KWS | T | G | T | T | T | Resistant |
| Somerset//× KW 2-1535 | | | | | | |
| Hickory × BC5215/× KWS | T | G | T | T | T | Resistant |
| Somerset//× KW 2-1535 | | | | | | |
| Hickory × BC5215/× KWS | T | G | T | T | T | Resistant |
| Somerset//× KW 2-1535 | | | | | | |
| Hickory × BC5215/× KWS | T | G | T | T | T | Resistant |
| Somerset//× KW 2-1535 | | | | | | |
| Hickory × BC5215/× KWS | T | G | T | T | T | Resistant |
| Somerset//× KW 2-1535 | | | | | | |
| Hickory × BC5215/× KWS | T | G | T | T | T | Resistant |
| Somerset//× KW 2-1535 | | | | | | |
| Hickory × BC5215/× KWS | T | G | T | T | T | Resistant |
| Somerset//× KW 2-1535 | | | | | | |
| Hickory × BC5215/× KWS | T | G | T | T | T | Resistant |
| Somerset//× KW 2-1535 | | | | | | |
| Hickory × BC5215/× KWS | T | G | T | T | T | Resistant |
| Somerset//× KW 2-1535 | | | | | | |
| Hickory × BC5215/× KWS | T | G | T | T | T | Resistant |
| Somerset//× KW 2-1535 | | | | | | |
| Hickory × BC5215/× KWS | T | G | T | T | T | Resistant |
| Somerset//× KW 2-1535 | | | | | | |
| Hickory × BC5215/× KWS | T | G | T | T | T | Resistant |
| Somerset//× KW 2-1535 | | | | | | |
| Hickory × BC5215/× KWS | T | G | T | T | T | Resistant |
| Somerset//× KW 2-1535 | | | | | | |
| Hickory × BC5215/× KWS | T | G | T | T | T | Resistant |
| Somerset//× KW 2-1535 | | | | | | |
| Hickory × BC5215/× KWS | T | G | T | T | T | Resistant |
| Somerset//× KW 2-1535 | | | | | | |
| Hickory × BC5215/× KWS | T | G | T | T | T | Resistant |
| Somerset//× KW 2-1535 | | | | | | |
| Hickory × BC5215/× KWS | T | G | T | T | T | Resistant |
| Somerset//× KW 2-1535 | | | | | | |
| Hickory × BC5215/× KWS | T | G | T | T | T | Resistant |
| Somerset//× KW 2-1535 | | | | | | |
| Hickory × BC5215/× KWS | T | G | T | T | T | Resistant |
| Somerset//× KW 2-1535 | | | | | | |
| Hickory × BC5215/× KWS | T | G | T | T | T | Resistant |
| Somerset//× KW 2-1535 | | | | | | |
| Hickory × BC5215/× KWS | T | G | T | T | T | Resistant |
| Somerset//× KW 2-1535 | | | | | | |
| Hickory × BC5215/× KWS | T | G | T | T | T | Resistant |
| Somerset//× KW 2-1535 | | | | | | |
| Hickory × BC5215/× KWS | T | G | T | T | T | Resistant |
| Somerset//× KW 2-1535 | | | | | | |
| Hickory × BC5215/× KWS | T | G | T | T | T | Resistant |
| Somerset//× KW 2-1535 | | | | | | |
| Lomerit | T | G | T | G | C | Susceptible |

### NON-PATENT LITERATURE

[0897] Lu, S., Wang, J., Chitsaz, F., Derbyshire, M. K., Geer, R. C., Gonzales, N. R., . . . & Thanki, N. (2020). CDD/SPARCLE: the conserved domain database in 2020. Nucleic acids research, 48(D1), D265-D268.
[0898] Monat, C., Padmarasu, S., Lux, T., Wicker, T., Gundlach, H., Himmelbach, A., . . . & Waugh, R. (2019). TRITEX: chromosome-scale sequence assembly of Triticeae genomes with open-source tools. Genome Biology, 20(1), 284.
[0899] Jost, M., Singh, D., Lagudah, E., Park, R. F., & Dracatos, P. (2020). Fine mapping of leaf rust resistance gene Rph13 from wild barley. Theoretical and Applied Genetics, 1-9.
[0900] Russell, J., Mascher, M., Dawson, I. K., Kyriakidis, S., Calixto, C., Freund, F., . . . & Hofstad, A. (2016). Exome sequencing of geographically diverse barley landraces and wild relatives gives insights into environmental adaptation. Nature Genetics, 48(9), 1024.
[0901] Saintenac, C., Zhang, W., Salcedo, A., Rouse, M. N., Trick, H. N., Akhunov, E., & Dubcovsky, J. (2013). Identification of wheat gene Sr35 that confers resistance to Ug99 stem rust race group. Science, 341(6147), 783-786.
[0902] Scholz, M., Ruge-Wehling, B., HabekuB, A., Schrader, O., Pendinen, G., Fischer, K., & Wehling, P. (2009). Ryd4 Hb: a novel resistance gene introgressed from Hordeumbulbosum into barley and conferring complete and dominant resistance to the barley yellow dwarf virus. Theoretical and Applied Genetics, 119(5), 837-849.
[0903] Steuernagel, B., Witek, K., Krattinger, S. G., Ramirez-Gonzalez, R. H., Schoonbeek, H. J., Yu, G., . . . & Jones, J. D. (2020). The NLR-Annotator tool enables annotation of the intracellular immune receptor repertoire. Plant Physiology.

[0904] The present invention is not to be limited in scope by the specific embodiments described herein. Indeed, various modifications of the invention in addition to those described herein will become apparent to those skilled in the art from the foregoing description and the accompanying figures. Such modifications are intended to fall within the scope of the appended claims. It is further to be understood that all values are approximate and are provided for description.

[0905] Patents, patent applications, publications, product descriptions, and protocols are cited throughout this application, the disclosures of which are incorporated herein by reference in their entireties for all purposes.

1. A method for identifying and/or selecting a barley plant or plant part having improved resistance or tolerance to Barley Yellow Dwarf Virus (BYDV) and/or insects, comprising screening for the presence or absence of a polynucleic acid comprising one or more molecular marker selected from ge51829s01, ge51835s01, ge45688s01, ge45691s01, ge45717s01, ge45718s01, and ge45719s01; and/or one or more molecular marker co-segregating with a resistance locus comprising a resistance gene located on chromosome 3 in a region comprising one or more molecular markers:
i) between position 573789473 of reference genome MOREX v3 detectable by molecular marker ge51829s01 and the resistance gene,
ii) between position 577673982 of reference genome MOREX v3 detectable by molecular marker ge51835s01 and the resistance gene,
iii) between position 591505046 of reference genome MOREX v3 detectable by molecular marker ge45688s01 and the resistance gene,
iv) between position 592578134 of reference genome MOREX v3 detectable by molecular marker ge45691s01 and the resistance gene,
v) between position 592685940 of reference genome MOREX v3 detectable by molecular marker ge45717s01 and the resistance gene,
vi) between the resistance gene and position 592752433 of reference genome MOREX v3 detectable by molecular marker ge45718s01, and/or
vii) between the resistance gene and position 592849403 of reference genome MOREX v3 detectable by molecular marker ge45719s01.

2. The method of claim 1, wherein the resistance gene comprises a polynucleotide having a sequence selected from the group consisting of:
(1) a genomic sequence of HORVU.MOREX.r2.3HG0265710, HORVU.MOREX.r2.3HG0265660, HORVU.MOREX.r2.3HG0265670, HORVU.MOREX.r2.3HG0265690, or HORVU.MOREX.r2.3HG0265720; or a sequence which is at least at least 90%, preferably at least 95%, identical to a genomic sequence of HORVU.MOREX.r2.3HG0265710, HORVU.MOREX.r2.3HG0265660, HORVU.MOREX.r2.3HG0265670, HORVU.MOREX.r2.3HG0265690, or HORVU.MOREX.r2.3HG0265720;
(2) a coding sequence of HORVU.MOREX.r2.3HG0265710 (SEQ ID NO: 2), HORVU.MOREX.r2.3HG0265660, HORVU.MOREX.r2.3HG0265670, HORVU.MOREX.r2.3HG0265690, or HORVU.MOREX.r2.3HG0265720, or a coding sequence which is at least 90%, preferably at least 95%, identical to a coding sequence of HORVU.MOREX.r2.3HG0265710v (SEQ ID NO: 2), HORVU.MOREX.r2.3HG0265660, HORVU.MOREX.r2.3HG0265670, HORVU.MOREX.r2.3HG0265690, or HORVU.MOREX.r2.3HG0265720;
(3) a sequence encoding a HORVU.MOREX.r2.3HG0265710, HORVU.MOREX.r2.3HG0265660, HORVU.MOREX.r2.3HG0265670, HORVU.MOREX.r2.3HG0265690, or HORVU.MOREX.r2.3HG0265720 protein; or encoding a protein having a sequence which is at least 90%, preferably at least 95%, identical to a protein sequence of HORVU.MOREX.r2.3HG0265710, HORVU.MOREX.r2.3HG0265660, HORVU.MOREX.r2.3HG0265670, HORVU.MOREX.r2.3HG0265690, or HORVU.MOREX.r2.3HG0265720; and
(4) a sequence hybridizing with the sequence of (1), (2), and/or (3) or a complement thereof or a reverse complement thereof (under stringent conditions);
preferably having a coding sequence as set forth in SEQ ID NO: 2, or a coding sequence which is at least 90%, preferably at least 95%, identical to a coding sequence as set forth in SEQ ID NO: 2.

3. The method according to claim 1, wherein:
ge51829s01 comprises a SNP corresponding to position 573789473 of reference genome MOREX v3, preferably wherein the SNP exhibits guanine (G) in a donor genotype and preferably adenine (A) in a recipient genotype;
ge51835s01 comprises a SNP corresponding to position 577673982 of reference genome MOREX v3, preferably wherein the SNP exhibits cytosine (C) in a donor genotype and guanine (G) in a recipient genotype;
ge45688s01 comprises a SNP corresponding to position 591505046 of reference genome MOREX v3, preferably wherein the SNP exhibits guanine (G) in a donor genotype and thymine (T) in a recipient genotype;
ge45691s01 comprises a SNP corresponding to position 592578134 of reference genome MOREX v3, preferably wherein the SNP exhibits adenine (A) in a donor genotype and guanine (G) in a recipient genotype;
ge45717s01 comprises a SNP corresponding to position 592685940 of reference genome MOREX v3, preferably wherein the SNP exhibits cytosine (C) in a donor genotype and thymine (T) in a recipient genotype;
ge45718s01 comprises a SNP corresponding to position 592752433 of reference genome MOREX v3, preferably wherein the SNP exhibits thymine (T) in a donor genotype and guanine (G) in a recipient genotype; and/or
ge45719s01 comprises a SNP corresponding to position 592849403 of reference genome MOREX v3, preferably wherein the SNP exhibits thymine (T) in a donor genotype and cytosine (C) in a recipient genotype.

4. The method according to claim 1, wherein:
ge51829s01 is detectable by molecular marker of SEQ ID NO: 3;
ge51835s01 is detectable by molecular marker of SEQ ID NO: 4;
ge45688s01 is detectable by molecular marker of SEQ ID NO: 5;
ge45691s01 is detectable by molecular marker of SEQ ID NO: 6;
ge45717s01 is detectable by molecular marker of SEQ ID NO: 7;
ge45718s01 is detectable by molecular marker of SEQ ID NO: 8; or
ge45719s01 is detectable by molecular marker of SEQ ID NO: 9.

5. The method according to claim 1, wherein the resistance locus comprising a resistance gene located on chromosome 3 comprises:
a) the nucleotide sequence having SEQ ID NO: 1,
b) a nucleotide sequence hybridizing with the nucleotide sequence of a) or a complement thereof or a reverse complement thereof under stringent conditions, and/or
c) a nucleotide sequence having an identity of at least 90%, preferably at least 95% to the nucleotide sequence of a).

6. A barley plant or plant part thereof, having improved resistance or tolerance to Barley Yellow Dwarf Virus (BYDV) and/or insects, comprising a resistance locus, which comprises a resistance gene having a sequence selected from the group consisting of:
(1) a genomic sequence of HORVU.MOREX.r2.3HG0265710, HORVU.MOREX.r2.3HG0265660, HORVU.MOREX.r2.3HG0265670, HORVU.MOREX.r2.3HG0265690, or HORVU.MOREX.r2.3HG0265720; or a sequence which is at least at least 90%, preferably at least 95%, identical to a genomic sequence of HORVU.MOREX.r2.3HG0265710, HORVU.MOREX.r2.3HG0265660, HORVU.MOREX.r2.3HG0265670, HORVU.MOREX.r2.3HG0265690, or HORVU.MOREX.r2.3HG0265720;
(2) a coding sequence of HORVU.MOREX.r2.3HG0265710 (SEQ ID NO: 2), HORVU.MOREX.r2.3HG0265660, HORVU.MOREX.r2.3HG0265670, HORVU.MOREX.r2.3HG0265690, or HORVU.MOREX.r2.3HG0265720, or a coding sequence which is at least 90%, preferably at least 95%, identical to a coding sequence of HORVU.MOREX.r2.3HG0265710 (SEQ ID NO: 2), HORVU.MOREX.r2.3HG0265660, HORVU.MOREX.r2.3HG0265670, HORVU.MOREX.r2.3HG0265690, or HORVU.MOREX.r2.3HG0265720;
(3) a sequence encoding a HORVU.MOREX.r2.3HG0265710, HORVU.MOREX.r2.3HG0265660, HORVU.MOREX.r2.3HG0265670, HORVU.MOREX.r2.3HG0265690, or HORVU.MOREX.r2.3HG0265720 protein; or encoding a protein having a sequence which is at least 90%, preferably at least 95%, identical to a protein sequence of HORVU.MOREX.r2.3HG0265710, HORVU.MOREX.r2.3HG0265660, HORVU.MOREX.r2.3HG0265670, HORVU.MOREX.r2.3HG0265690, or HORVU.MOREX.r2.3HG0265720; and
(4) a sequence hybridizing with the sequence of (1), (2), and/or (3) or a complement thereof or a reverse complement thereof (under stringent conditions);
preferably having a coding sequence as set forth in SEQ ID NO: 2, or a coding sequence which is at least 90%, preferably at least 95%, identical to a coding sequence as set forth in SEQ ID NO: 2;
preferably wherein the resistance locus has a marker haplotype as provided in Table 2, such as:
cytosine (C) or thymine (T) at position 592685940 with reference to genome MOREX v3, and thymine (T) at position 592752433 with reference to genome MOREX v3;
preferably wherein the plant or the part thereof was not obtained exclusively by an essentially biological process for the production of a plant.

7. The plant or plant part thereof of claim 6, wherein the marker haplotype further comprises:
(I) adenine (A) at position 573789473 with reference to genome MOREX v3, cytosine (C) at position 577673982 with reference to genome MOREX v3, guanine (G) at position 591505046 with reference to genome MOREX v3, adenine (A) at position 592578134 with reference to genome MOREX v3, and thymine (T) at position 592849403 with reference to genome MOREX v3;
(II) adenine (A) at position 573789473 with reference to genome MOREX v3, guanine (G) at position 577673982 with reference to genome MOREX v3, guanine (G) at position 591505046 with reference to genome MOREX v3, adenine (A) at position 592578134 with reference to genome MOREX v3, and thymine (T) at position 592849403 with reference to genome MOREX v3;
(III) adenine (A) at position 573789473 with reference to genome MOREX v3, guanine (G) at position 577673982 with reference to genome MOREX v3, thymine (T) at position 591505046 with reference to genome MOREX v3, adenine (A) at position 592578134 with reference to genome MOREX v3, and thymine (T) at position 592849403 with reference to genome MOREX v3;
(IV) adenine (A) at position 573789473 with reference to genome MOREX v3, guanine (G) at position 577673982 with reference to genome MOREX v3, thymine (T) at position 591505046 with reference to genome MOREX v3, guanine (G) at position 592578134 with reference to genome MOREX v3, and thymine (T) at position 592849403 with reference to genome MOREX v3;
(V) guanine (G) at position 573789473 with reference to genome MOREX v3, cytosine (C) at position 577673982 with reference to genome MOREX v3, guanine (G) at position 591505046 with reference to genome MOREX v3, adenine (A) at position 592578134 with reference to genome MOREX v3, and cytosine (C) at position 592849403 with reference to genome MOREX v3;
(VI) adenine (A) at position 573789473 with reference to genome MOREX v3, cytosine (C) at position 577673982 with reference to genome MOREX v3, guanine (G) at position 591505046 with reference to genome MOREX v3, adenine (A) at position 592578134 with reference to genome MOREX v3, and cytosine (C) at position 592849403 with reference to genome MOREX v3;
(VII) adenine (A) at position 573789473 with reference to genome MOREX v3, guanine (G) at position 577673982 with reference to genome MOREX v3, guanine (G) at position 591505046 with reference to genome MOREX v3, adenine (A) at position 592578134 with reference to genome MOREX v3, and cytosine (C) at position 592849403 with reference to genome MOREX v3;
(VIII) adenine (A) at position 573789473 with reference to genome MOREX v3, guanine (G) at position 577673982 with reference to genome MOREX v3, thymine (T) at position 591505046 with reference to genome MOREX v3, adenine (A) at position 592578134 with reference to genome MOREX v3, and cytosine (C) at position 592849403 with reference to genome MOREX v3;
(IX) adenine (A) at position 573789473 with reference to genome MOREX v3, guanine (G) at position 577673982 with reference to genome MOREX v3, thymine (T) at position 591505046 with reference to genome MOREX v3, guanine (G) at position 592578134 with reference to genome MOREX v3, and cytosine (C) at position 592849403 with reference to genome MOREX v3;
(X) thymine (T) at position 591505046 with reference to genome MOREX v3, guanine (G) at position 592578134 with reference to genome MOREX v3, and thymine (T) at position 592849403 with reference to genome MOREX v3; or
(XI) guanine (G) at position 591505046 with reference to genome MOREX v3, adenine (A) at position 592578134 with reference to genome MOREX v3, and thymine (T) at position 592849403 with reference to genome MOREX v3.

8. The plant or plant part thereof of claim 6, wherein the resistance locus comprising the resistance gene is located on chromosome 3 in a region comprising:
a) the nucleotide sequence having a sequence as set forth in SEQ ID NO: 1,
b) a nucleotide sequence hybridizing with the nucleotide sequence of a) or a complement thereof or a reverse complement thereof under stringent conditions, and/or
c) a nucleotide sequence having an identity of at least 90%, preferably at least 95% to the nucleotide sequence of a).

9. A method for generating or producing a barley plant or plant part and/or for conferring/improving resistance or tolerance to Barley Yellow Dwarf Virus (BYDV) and/or insects, comprising introducing into the genome of a barley plant or plant part a resistance locus, which comprises a resistance gene having a sequence selected from the group consisting of:
(1) a genomic sequence of HORVU.MOREX.r2.3HG0265710, HORVU.MOREX.r2.3HG0265660, HORVU.MOREX.r2.3HG0265670, HORVU.MOREX.r2.3HG0265690, or HORVU.MOREX.r2.3HG0265720; or a sequence which is at least at least 90%, preferably at least 95%, identical to a genomic sequence of HORVU.MOREX.r2.3HG0265710, HORVU.MOREX.r2.3HG0265660, HORVU.MOREX.r2.3HG0265670, HORVU.MOREX.r2.3HG0265690, or HORVU.MOREX.r2.3HG0265720;
(2) a coding sequence of HORVU.MOREX.r2.3HG0265710 (SEQ ID NO: 2), HORVU.MOREX.r2.3HG0265660, HORVU.MOREX.r2.3HG0265670, HORVU.MOREX.r2.3HG0265690, or HORVU.MOREX.r2.3HG0265720, or a coding sequence which is at least 90%, preferably at least 95%, identical to a coding sequence of HORVU.MOREX.r2.3HG0265710 (SEQ ID NO: 2), HORVU.MOREX.r2.3HG0265660, HORVU.MOREX.r2.3HG0265670, HORVU.MOREX.r2.3HG0265690, or HORVU.MOREX.r2.3HG0265720;
(3) a sequence encoding a HORVU.MOREX.r2.3HG0265710, HORVU.MOREX.r2.3HG0265660, HORVU.MOREX.r2.3HG0265670, HORVU.MOREX.r2.3HG0265690, or HORVU.MOREX.r2.3HG0265720 protein; or encoding a protein having a sequence which is at least 90%, preferably at least 95%, identical to a protein sequence of HORVU.MOREX.r2.3HG0265710, HORVU.MOREX.r2.3HG0265660, HORVU.MOREX.r2.3HG0265670, HORVU.MOREX.r2.3HG0265690, or HORVU.MOREX.r2.3HG0265720; and
(4) a sequence hybridizing with the sequence of (1), (2), and/or (3) or a complement thereof or a reverse complement thereof (under stringent conditions);
preferably having a coding sequence as set forth in SEQ ID NO: 2, or a coding sequence which is at least 90%, preferably at least 95%, identical to a coding sequence as set forth in SEQ ID NO: 2;
preferably wherein the resistance locus has a marker haplotype as provided in Table 2, such as:
cytosine (C) or thymine (T) at position 592685940 with reference to genome MOREX v3, and thymine (T) at position 592752433 with reference to genome MOREX v3.

10. The method of claim 9, wherein the marker haplotype further comprises:
(I) adenine (A) at position 573789473 with reference to genome MOREX v3, cytosine (C) at position 577673982 with reference to genome MOREX v3, guanine (G) at position 591505046 with reference to genome MOREX v3, adenine (A) at position 592578134 with reference to genome MOREX v3, and thymine (T) at position 592849403 with reference to genome MOREX v3;
(II) adenine (A) at position 573789473 with reference to genome MOREX v3, guanine (G) at position 577673982 with reference to genome MOREX v3, guanine (G) at position 591505046 with reference to genome MOREX v3, adenine (A) at position 592578134 with reference to genome MOREX v3, and thymine (T) at position 592849403 with reference to genome MOREX v3;
(III) adenine (A) at position 573789473 with reference to genome MOREX v3, guanine (G) at position 577673982 with reference to genome MOREX v3, thymine (T) at position 591505046 with reference to genome MOREX v3, adenine (A) at position 592578134 with reference to genome MOREX v3, and thymine (T) at position 592849403 with reference to genome MOREX v3;
(IV) adenine (A) at position 573789473 with reference to genome MOREX v3, guanine (G) at position 577673982 with reference to genome MOREX v3, thymine (T) at position 591505046 with reference to genome MOREX v3, guanine (G) at position 592578134 with reference to genome MOREX v3, and thymine (T) at position 592849403 with reference to genome MOREX v3;
(V) guanine (G) at position 573789473 with reference to genome MOREX v3, cytosine (C) at position 577673982 with reference to genome MOREX v3, guanine (G) at position 591505046 with reference to genome MOREX v3, adenine (A) at position 592578134 with reference to genome MOREX v3, and cytosine (C) at position 592849403 with reference to genome MOREX v3;
(VI) adenine (A) at position 573789473 with reference to genome MOREX v3, cytosine (C) at position 577673982 with reference to genome MOREX v3, guanine (G) at position 591505046 with reference to genome MOREX v3, adenine (A) at position 592578134 with reference to genome MOREX v3, and cytosine (C) at position 592849403 with reference to genome MOREX v3;
(VII) adenine (A) at position 573789473 with reference to genome MOREX v3, guanine (G) at position 577673982 with reference to genome MOREX v3, guanine (G) at position 591505046 with reference to genome MOREX v3, adenine (A) at position 592578134 with reference to genome MOREX v3, and cytosine (C) at position 592849403 with reference to genome MOREX v3;
(VIII) adenine (A) at position 573789473 with reference to genome MOREX v3, guanine (G) at position 577673982 with reference to genome MOREX v3, thymine (T) at position 591505046 with reference to genome MOREX v3, adenine (A) at position 592578134 with reference to genome MOREX v3, and cytosine (C) at position 592849403 with reference to genome MOREX v3;
(IX) adenine (A) at position 573789473 with reference to genome MOREX v3, guanine (G) at position 577673982 with reference to genome MOREX v3, thymine (T) at position 591505046 with reference to genome MOREX v3, guanine (G) at position 592578134 with reference to genome MOREX v3, and cytosine (C) at position 592849403 with reference to genome MOREX v3;
(X) thymine (T) at position 591505046 with reference to genome MOREX v3, guanine (G) at position 592578134 with reference to genome MOREX v3, and thymine (T) at position 592849403 with reference to genome MOREX v3; or
(XI) guanine (G) at position 591505046 with reference to genome MOREX v3, adenine (A) at position 592578134 with reference to genome MOREX v3, and thymine (T) at position 592849403 with reference to genome MOREX v3.

11. The method according to claim 9, wherein the resistance locus comprising the resistance gene is located on chromosome 3 in a region comprising:
a) the nucleotide sequence having SEQ ID NO: 1,
b) a nucleotide sequence hybridizing with the nucleotide sequence of a) or a complement thereof or a reverse complement thereof under stringent conditions,
c) a nucleotide sequence having an identity of at least 90%, preferably at least 95% to the nucleotide sequence of a).

12. A method for generating or producing a barley plant or plant part and/or for conferring/improving resistance or tolerance to Barley Yellow Dwarf Virus (BYDV) and/or insects, comprising introducing into the genome of a barley plant or plant part a polynucleotide having a sequence selected from the group consisting of:
(1) a genomic sequence of HORVU.MOREX.r2.3HG0265710, HORVU.MOREX.r2.3HG0265660, HORVU.MOREX.r2.3HG0265670, HORVU.MOREX.r2.3HG0265690, or HORVU.MOREX.r2.3HG0265720; or a sequence which is at least at least 90%, preferably at least 95%, identical to a genomic sequence of HORVU.MOREX.r2.3HG0265710, HORVU.MOREX.r2.3HG0265660, HORVU.MOREX.r2.3HG0265670, HORVU.MOREX.r2.3HG0265690, or HORVU.MOREX.r2.3HG0265720;
(2) a coding sequence of HORVU.MOREX.r2.3HG0265710 (SEQ ID NO: 2), HORVU.MOREX.r2.3HG0265660, HORVU.MOREX.r2.3HG0265670, HORVU.MOREX.r2.3HG0265690, or HORVU.MOREX.r2.3HG0265720, or a coding sequence which is at least 90%, preferably at least 95%, identical to a coding sequence of HORVU.MOREX.r2.3HG0265710 (SEQ ID NO: 2), HORVU.MOREX.r2.3HG0265660, HORVU.MOREX.r2.3HG0265670, HORVU.MOREX.r2.3HG0265690, or HORVU.MOREX.r2.3HG0265720;
(3) a sequence encoding a HORVU.MOREX.r2.3HG0265710, HORVU.MOREX.r2.3HG0265660, HORVU.MOREX.r2.3HG0265670, HORVU.MOREX.r2.3HG0265690, or HORVU.MOREX.r2.3HG0265720 protein; or encoding a protein having a sequence which is at least 90%, preferably at least 95%, identical to a protein sequence of HORVU.MOREX.r2.3HG0265710, HORVU.MOREX.r2.3HG0265660, HORVU.MOREX.r2.3HG0265670, HORVU.MOREX.r2.3HG0265690, or HORVU.MOREX.r2.3HG0265720; and/or
(4) a sequence hybridizing with the sequence of (1), (2), and/or (3) or a complement thereof or a reverse complement thereof (under stringent conditions);
preferably having a coding sequence as set forth in SEQ ID NO: 2, or a coding sequence which is at least 90%, preferably at least 95%, identical to a coding sequence as set forth in SEQ ID NO: 2.

13. An isolated polynucleic acid, in particular suitable as a molecular marker, comprising at least 15, preferably at least 18, more preferably at least 20, contiguous nucleotides of any of SEQ ID NO: 3 to 9, or complementary to contiguous nucleotides of any of SEQ ID NO: 3 to 9, or reverse complementary to contiguous nucleotides of any of SEQ ID NO: 3 to 9, preferably which is a primer or a probe, preferably an allele-specific primer, preferably which is a KASP primer.

14. A primer or probe capable of specifically detecting the resistance locus, the one or more molecular marker, the resistance gene or coding sequence thereof, or the SNP as defined in claim 1.

15. A method of using the polynucleic acid or the primer or probe of claim 13 for identifying or selecting a barley plant or plant part having improved resistance or tolerance to Barley Yellow Dwarf Virus (BYDV) and/or insects.

The application's sequence listing, which the Patent Office published only in electronic form, follows.

SEQUENCE LISTING (13 sequences)

SEQ ID NO: 1 - DNA, 692832 bp, Hordeum bulbosum
  source 1..692832: mol_type = genomic DNA; note = Ryd4Hb locus
ttgtcgagctgcagcttcaggagaacatgctgaccggcatggtgccgctggaggtcctctctcttgttcttgtcggggacttgactgaactgtgagtagtgcggtttgtttcacacaacagaaattgcatccgctttcttcctcttacaatatttttttaccttcgcgcagaaatgttgccaagaacaatcttgctggcactgtcagatcatctaaaccaagaggtagcgatccatatatttgtgatctgcaactctaacgaattaagttattctgcagtagtaattttcggtgtgcacaatatatctaaaccaattggaatcatctgcagtggctacggtcatccaggacacgctcaagactacaagctgagaagtggtggcaacctgatcttttgtaagagtaaactgaatgatttttcattctgaaactgctggcagtagatgtagctgcaacctgagcttttgtagacatctattcaggcttacctctgcttcaagaaaaaaatagaaggaggaagttgtggttgaatgcattgtaattactagcaaccttttacccgcacatcatgtgtaatcgtatctcactataaactataaaaacccttgccacatgtggcccggcttcccttgctctgtgctaaagggagcatgtgatggccctcggtgtttttgatggcttgaaggctatctaggataatcattattgtcaatggattttatttgaacatatctacagtaattatgtatctttctttcttaaagataggggtttccctctgccccaacttttattaaaccaaggcaatgaaaccagcatccaacgttttacaactctcggtaagcacccaaaagtagctgccacaggataaacgcaaatggttctaacatagccatgattacagaccaaaagacgggcatccacatcaatgatagacaacaacaagacatccagtcgaggccccgatctaaccattatgccaggctatccaaagcaattcccctcgccgatcatccaaccggcttaaacactagagaagaagagcaccctgggtgtctgtacatagtatcttccattgccttatcagtgacccaatcaagtccagaacgcattgtatgcttcgccatcttcgccctggaaaacaaattcattcggaacaaccataagccccacaagggagcagatgtaacaatattaatagcctcaattttttccctctgttttccaaagaggcaacggagataaaaaaaaaaaaaaacatgtacagaaataccaacacaatcagcaataatagaccagatttccttcactacaatgcaatcaaagagatgttgaatacgcggcctcttgattactctgcacacattgccgcctgtgatcccgcctaaccacggtccacactggcggcatgatgggcccggcctccactccagatccgtccgccgttgatctcgtatcctccctcccgacgtgatccggcctccaccactacgcacaggttcgacgggatccaccactctagcgagcaggaataacacggtggttgtggtctgctcgacccccaactgataatatgaggtgtacggtggtctgcagtacgataatcacattgatattgttagaaatatgacctagaggcaataataaattcgttattatcatacttccctccgtccataataaaagattattttacaagctaaaacaacttaaaaacgattttatattataggatggagggagtagtaagtgagaaacattttacatgaggggattgtaggcacagtgaacgtgtgttcggagtacacgtagcacgtgcatggcagaggtgaagtagtagtccattcgccctggtcaaacattcttttaaatggcttgatataaaactgggatgatcgcagacgcatggtcatatattttgttaataattggaccaacagcggtactgcgctgctttaggacagagggtgaacaaggacaagtcgtcaattttttttcagcaagggctgctccgaggatctcagggcagagaatgaatagctgtccgaaaaatatttgggattgccctcggatgtagggcgggataaggaaggatctttcaagtttttgaaagaccgcatctggaagcaggtccaaggatggatagaaaaatctctatgtgctgggggaaagaggtactgatcaagtctgttgcataggccatccctacctattcaatggcgtgtttcaagctttcgcgaggtctatgccaacatatcaatggactcctgcgaaaattctggtggggctcaaagaagggagagaggaagattgcctgggttccttgggagaccatgtcacaacccaaattcatgggtggaatgggcttctgagatattgagttgttcaaccttgcgctgcttgctcggcaagcctggcgcctccttcaggaacccaacaccctcagtgctcggattctcaaggtggtatactttccaacgtcatccattctccatgtagagctggggaagcatccatctcaggtctggcgttcaattgtggagggtcgtgacatcttgcgtcttggcctcataaagcgaataggctctggtgcagatacggatatctgacatgacaactggatcccaagggattttaagctccggccggtatgtcccaaatctgaatttcctccacattcggttgctgaacttattgaccctcttactaggacctgggaccgcagtgttttggaggagcatttttaccagatggatatggaggccatactgaatattccgctcagctctagggctcagtgtgacttctgggcctagcactatgagaggaagggcatcttctcagtccagtctacatatcgactcatagcttccactaagcagcagcgaacggactggctcgaacacatggagggtcactctaactccgaagctgatcgtcgttcctggacacgcctctggggtgcttcggttccctccaagataaaggttttcgcatggaggctagcaaaaacatcgcttcaaactggtgatgtacggatgaacaaaagtatgacggattctgcagaatgccctctatatcatgcggcgaccgactcttggcgccacactctcttggactgccatatggcacggtgtgtctgggctttggaggatgaggatctcacggaaactgtcatctcgaaccggtcggaagatgcgaggctctggttgcactggctggtagacacactcccatcgatggactttgctagagtcctagtgacgccgtgggccatttggtgggctcgtcgaaaggctatccacgaagaacagattcaaagtccgctgagcacgcgtgtgtttatcaccaagttcttggctgatctggagatgatcccctcaccggtgaaccatgcaaaggatcgtccgaggcgagacccccagaggccagcgcaagcgtctgatcttcgccacccacagccgatgccgaggtggtgtccgccgaagggacatgcaatgaagatcaatgtggatgggggcttctcaaagattggcgaccgaggtgcgtcggctgcagtttgcaggaacaaagcggggacatatctgggagccttggttatcatctacgaagggctcctggatccgaccattcttgaagcacaggcgtgccttgaggcacttgcgctcgcgacggatcttaacatacaatccgtgtgcattgcatctgactgtctggaagttgttatatatattgagaaggaggtcccctgccgctatgccgctattcagcaagatatcaagtttctggctcaaccctttcaggaggtccatttcatgcatgagagtaggaagtttaatgggaaggctcatgccctagccaaagctgcggcatccctccctcccgggcgccatttgtggcttactagtttgcccgatatcatttgtatccccatgtctatgaatcttcaataaagggtacgaatttctcaaaaaaaaaactactaaaacgcaaaatagtgaaccaaaccaaagtggtgtgcagcagatctgacttcgatcaccctggatccgttgattgcggtgtgtcccatacgggttgggggaggcaatggttatccacattgccctccatcactcccgggaggattgtgcccggccgacggcgagatatgtccgacgtgaatccattgcagcggtgcaacacacgctcggatcctccgaggctggttcatcgcggtcctcccaggagtcttcacatctccctttccccatcatcggtccgccgaagtatgagtgctatcgggaccggtgtggctaccttggaaaggataggatgagggtggccgaggcccaacttgctgttaaaatggcggcggcaaaggcggcgtacacggtggcacgtgtgaccacagaggaggaacatctgcgtcctcgccctcgagcagaatcagactgctcttccccctcccccctagaggagaaggaagagagtgacgtgtcgtacaactctggcaaagtgtagatctggcttgatccattttgtacttttgaccgctactttcgcgagaaggatggcaagcacactgggaagggcaatggtagtcctagatgatcttcttcatagctagtaattgttggaattatgccctagaggcaataataaattagttattattatatttcctgtttcaagataatcgtttattatccatgctataattgtattgatcggaaacattgatgcatgtgtggatgtatagacaaaacactatccctagtaagcctctagttgactagctcgttgatcaaagatggttaaggtttcctaaccatggacaaggtgttgtcacttgataacggggtcacatcattaggagaatgatgtgatggacaagaccaaactattaaacgtagcatatgatcgtgtaagtttactgctacagttttgtgcatgtcaatgtatctgttcctatgaccatgagatcatgcaactccctgacatcggaggaatactttgtgtgtatcaaacatcgcaacgtaactgggtgactataaagatgcactacgggtgtcttcgaagatgtctgtggtgttggcatggatcaagactgggatttgtcactccgtgtttcggagaggtatctcggggcccactcggtaatgcaacatcacaaacaagccttgcaagcaatgtgcctaaggagttagacacgggatcttgtattacagaacgagtaaagagacttgccggtaacgagattgaaataaggtataggataccgacgatcgaatctcgggcaagtaacataccgaaggacaaagggaatggcatacgtgattatatgaatccttggcatagtggttcaaccgataagattatcatagaatatgtaggatccaatatggacatccaggtcccgctattggatattgactgagaagtgtctcaggtcatgtctacatagttctcgaacccgcaaggtctgcacacttaaggttcggtgacgtttcggagtagttgagttataggtggtgaaaatcgaagttttgttcggagtcccggatgagatccaggacgtcacgaggagttccggaatggtccggaaacgaagattgatatataggaagtcctattttagttaccggaaaggtttcgggcattatcggtagtgtaccgggaatgacgaatgggttccggatcttcaccgggaggggggaccaccctcccggggttgccaagtggccaaggggtggcgcaccaggaggtgggaccagccacaagaggcccttgcgcaagggggaaggaaaaaccaaaagggagaaagaaaaaaaggggaaaggtgggatggtggagtaggactcctccttcaatcctaattggagtaggattggaggtggaatccaactccacctccttatggcgcaccaaaggggccttggcccccaagccaaggccgcctcccctcctcctatatatattggacatctagggctgatttgagacaactctttccaagtgcatctcagatctagacagccatacttctccgtttttcctctagatcgcgattctgcggagcttaggcgaagccctgcaggattagcaacaccaccacctccggagcgccgttaggctgccggagaactcatctccctcttcgtctctcttgctggatcaagaaggcggagatcgtcatcgagctgcacgtgtgcggaacgcggaggtgccgtccgttcggcactagatcgggacggatcgcaaggcggttcgtgggatggatcgcgggactgttcgtgggacagagatttggatctcacgagctgtaccactacaccaaccgcgttcattaacgcttcccgcttagcgatctacaagggtatgtagatccactctccctctcgtagatgatcatcaccatgataggtcttcgtgagcgtaggaaattttttgtttccaatgttgcgttccccaacagtggcatcatgagctagggttcatgcgtagatgattttctcgagtagatcacaaaggagtttgtgagcgttgatgcttaagttgctatcctccttattcttctcttgattcggcggcattgttgaatcgaagcggcccaggccgacattactcgtaaccacgagagactggcttcaccgttaacatgcaataagattgcatcaaggtggctttgtgggtgcctgtttcttcaactttagttgaatcggattagaacgaggcggatcttggagaagatgaaaaagcaacttactcatcaccgttgtggtttttgcgtaagtaagatgcgatcatactagatacccatagcaaccacgtaaaactggcaacaacaaattagaggacgtctaacttgtttttgcagggtatgcttgtgatgtgatatggccaacaacatgatgtgatatattggatgtatgagatgtgtcatgttgtaatagttaaatatcgacttgcacgtcgatgctacggcaaccggcaggagccatagggttgtctttaaactaacgtttgtgcttgcagatgcgtttactattttgctaggttgtagcattggtagtaatagcatagatagcacgacaaccacgatggcaacacaatgatggagatcatgatgatggagatcatggtgtggcgccggtgacgatgaagatcatgccggtgcttcagtgatggagatcgtgaagcacggagttcatggccatatcatgtcacttatgatttgcatgtgatgttaatccttttatgcaccttgttttgcttagtaacggcggtagcattatgaggtgatctctcactaaaatttcaagataaaacttgtgttctccccgactgtgcaccgttgctacagttcgtcgtttcgagacaccacgtgatgatcgggtgtgatagactcaacgttcacatacaacgggtgcaagacagttgcacacgcggaacactcgggttaaacttgacgagcctagcatgtacagacatggcctcggaacactggagaccgaaaggtcgagcatgaatcatatagttgatatgatcagcatagagatgctcaccaatgtagctaaactcaactcacgtgatgatcggacttgagctagtgaaattggatcatgcaccactcagatgaccagagggatgtattttctgagtgggaggttttagtaatatgattagctaaactaaattatcttgaacatagtctaagtctactttgctatatctatgttgtagatcaatggctcgcgcgcccgctaccctgaattttaatacgctcctagagaaagctaagttgaaagatgatggtacgaacttcgccgattgggctcgtaatctgaggattgtcctcaaggctggccaaaaggattatgtccttgatgctgagcttggtgatgaaccaccccctgcggttgcgcaagacgttaggaacgcctatcaagcgcgtaaggaagactactcgctagttcaatgtgcaatcctgtatggcttagaaccgggacttcaaagacgttttgaacgtcatggtgcatatgagatgttccaggagataaaatttatcttcgagaagaacgcccggatcgagaggtatgagacctccgataagttctttgcttgcaagatggaggagaattcgtcagtcagtgagcatgtgctcaagatgtctgggttgtctaaccgactggctgagctgggagttgttctcccgcaagaagctgtcactgacaagattctccaatcactgccacctagctttaagagctttgtgttgaactataacatgcaagggatgaacaaatctcctgctgagttgtttgcgatgcttaaagtcgctgagtcggaaatccgcaaagagcatcaagtgttgatggtgaataagaccaccagtttcaagaaaaagggcaaaggcaagaagggtaactctaagaagggcggcaaatctgttgctggtccaacgaagaaacccaaggctggtcctaagccggaaactgagtgctattattgcaaggggactggtcattggaagcgcaactgccccaaatacctggcagataagaaggcggcgaaagacaaacaaggtatatttgatatacatgttattgatgtgtaccttactggttctcgtagtagtgcctgggtatttgataccggttctgttgctcatatttgcaactcgaaacaggaactacggaataagcgaagactagcaaaggatgaagtgacgatgcgcgtgggaaacggttccaaggttgatgcgatcgccgtcggcacagtctcacttcagttaccatcgggattagtgatgaacttaaataattgttatttagtgcctgcgttaagcatgaacattatatctggatcttgtttattgcgagacggttactcatttaagacagagaataatggttgttctatttatatgagtaatatcttttatggtcaagcacccattgtgaggggtttattcattttgaatctcgacggtgatgaaactcacgtccataacattgagaccaaaagatgtcgagttagtaatgatagtgctacttttatgtggcactgccgtttaggtcatattggtgtaaagcgcataaagaaactccatgctgatggacttttggagtcacttgatttcgaatcacttggcacgtgcgaaccatgcctcatgggcaagatgactaaaactccgttctccggaacaatggagcgtgcaagtgacttgttggaaatcatacatacagatgtgtgcggaccaatgagcatagaggcacgcggtggatatcgttactttctcaccttcactgatgatttaagtagatatgactatatttacttaatgaagcacaagtctgaaacgtttgaaaagttcaagcaatttcagagtgaagtagagaatcatcggaacaagaagatcaagttcctgcgatctgatcgaggaggagagtatctgagtttcgagtttggtgctcacttaagacaatgtggaattgtttcacaattaacaccgcctggaacaccacagcgtaatggtgtgtccgaacgtcgtaatcgtactttattggatatggtgcgttctatgatgtctcttactgatttgccgttatcgttttggggctacgcattagagactgctgcattcactttaaatagggcaccatcaaaatccgttgagacgacaccatacgagctgtggtatggcaagaagccaaagctgtcgtttcttaaagtttggggatgtgatgcttatgtcaaaaagctccagcctgaaaaactggaacccaaagcggaaaagtgcgtcttcataggatacccgaaagagacagttgggtataccttctatctcagatccgagggcaaagtgtttgtcgctaagaacggagcttttcttgagaaagagtttctctcgaaagaactgagtgggaggaagatagaacttgatgaggttcccgaacctctgcttcaaggtggcgcagggcaggaagaagttcctgttgatgcaacgccagttgaagaagaagctaatgatagagatcaagagccttcggaacaagttgctatcgaacttcgcaggtcgacaagagtacgttctgcaccagagtggtacggaaatcctgtcttaactgtgctgttgttggacaacagtgaacctgcgaattatggagaagcaatgatgtgtccagattccaagaaatggctagaagccatgaactctgagataggatccatgtatgagaacaaagtatggactttggaggaattacctgaaggccgaaaggctattcagaacaaatggatcttcaagaagaagacagatgcggacggtaatataaccgtctataaagctcgacttgtggcaaaggggttttcacaagttcaaggggttgactacgatgagactttctcacccgtagcgatgcttaaatctgtccgaatcatgttagcgattgctgcatatttcgactatgagatatggcagatggatgtcaaaacggcgttccttaacgggtttcttaaggaagagttgtatatgatgcaacccgaaggttttgtcgatccagaaaatgctgacaaagtttgcaagctccagcgatccatttatggactggtgcaagcatctcggagctggaataaacgttttgatgaggtgatcaaggcgtttggatttgtacaagttgaaggagaagcttgtatctacaagaaagtgagtgggagctctgtggcgtttctggtgctgtatgtggatgacatactgctgatcggaaacagtatacagtttttggatagcataaaggattacttgaacggaaccttctctatgaaggacctcggagaagctgcttacatattgggcatcaagatctatagagatagatcaagacgcacaataggactttcacaaggcacataccttgataagatgttgaagaagttcaacatggaacaatccaagaaggggttcttgcctgtgttgcaaggtataaagttgagtaagactcaatgcccagtcactgatgctgatagaaagaagatgagtaccatcccctatgcttcagtcataggctctatgatgtatgcaatgctgtgcacacgaccggatgtcagcctcgctgtgagcttggcaggcaagtttgctggtaatccaggtatggatcactggatggcggtcaagaacatcctgaagtacctgaaaaggactaaggacatgtttctcgtgtatggaggtgacgaagagctcgccgtaaagggttacatcgatgcaagcttcgacacagatccggatgactctaagtcacagaccggatacgtatatattcttaatgggggtgcggtaagctggtgcagtcccaagcagagcgtcgtagcagactctacatgcgaagcggagtacatagcggcctcggaggcagctaaagaaggtgtctggatgaagcagttcatgacagatcttggagtagtgccaagcgcactgggtccaatacctctgttctgtgataacactggtgccattgctctagcaaaggaaccaaggtttcacaagaggaccagacacatcaaacgatgcttcaacgtcatccgcgactgggtcgaaggagaagacatagatatatgcaaagtacacacggatctgaacatagcagacccgctgactaaacctcttccacgggccaagcatgaaagacaccagaactatatgggtgttagattgttaaattgtaaagatcacatagagatgtgatgctagagtattgactctagtgcaagtgggagactgttggaattatgccctagaggcaataataaattagttattattatatttcctgtttcaagataatcgtttattatccatgctataattgtattgatcggaaacattgatgcatgtgtggatgtatagacaaaacactatccctagtaagcctctagttgactagctcgttgatcaaagatggttaaggtttcctaaccatggacaaggtgttgtcacttgataacggggtcacatcattaggagaatgatgtgatggacaagaccaaactattaaacgtagcatatgatcgtgtaagtttactgctacagttttgtgcatgtcaatgtatctgttcctatgaccatgagatcatgcaactccctgacatcggaggaatactttgtgtgtatcaaacgtcgcaacgtaactgggtgactataaagatgcactacgggtgtctccgaagatgtctgtggtgttggcatggatcaagactgggatttgtcactccgtgtttcggagaggtatctcggggcccactcggtaatgcaacatcacaaacaaggcttgcaagcaatgtgcctaaggagttagacacgggatcttgtattacagaacgagtaaagagacttgccggtaacgagattgaaataaggtataggataccgacgatcgaatctcgggcaagtaacataccgaaggacaaagggaatggtatacgggattatatgaatccttggcatagtggttcaaccgataagattatcgtagaatatgtaggatccaatatggacatccaggtcccgctattggatattgactgagaagtgtctcaggccatgtctacatagttctcgaacccgcaaggtctgcacacttaaggttcggtgacgtttcggagtagttgagttataggtggtgaaaatcgaagttttgttcggagtcccggatgagatccaggacgtcacgaggagttccggaatggtccagaaacgaagattgatatataggaagtcctattttggttaccggaaaggtttcgggcattaccggtagtgtaccgggaatgacgaatgggttccggatcttcaccgggagggggggaccaccctcccggggttgccaagtggccaaggggtggcgcaccaggaggtgggaccagccacaagaggcccttgcgcaagggggaaggaaaaaccaaaagggagaaagaaaaaaaggggaaaggtgggatggtggagtaggactcctccttcaatcctaattggagtaggattggaggtggaatccaactccacctccttatggcgcaccaaaggggccttggcccccaagccaaggctgcctcccctcctcctatatatattggacatctagggctgatttgagacaacttttgccaagtgcatctcagatctagacagccatacttctccgtttttcctctagatcgcgattctgtggagcttaggcgaagccctgcaggattagcaacaccaccacctccggagcgccgttaggctgccggagaactcatctccctcttcgtctctcttgctggatcaagaaggcggagatcgtcatcgagctgcacgtgtgctgaacgcggaggtgccgtccgttcggcactagatcgggacggatcgcaaggcggttcgtgggacggatcgcgggactgttcgtgggacggagatttggatctcacgagctgtaccactacaccaaccgcgttcattaacacttcccgcttagcgatctacaagggtatgtagatccactctccctctcgtagatgatcatcaccatgataggtcttcgtgagcgtaggaaattttttgtttccaatgctgcgttccccaacagtaatgtaggtagaacatgccaaattttgatagtccgatgtcatatgtcctaatgtagtagacggatgatttgtgctacgacgtttaccttgtgtagcatgttttgtatggatttgatgtttgttaattgagatgttcggttatgcaaaggaaaatttgagatgttcgtgaacgtttgaggacctagatatattatccatggttgtagatgctctaacggtgaattcacacaaaagttgaatacgcagcaaatcataatgacggtctattgcctagactgacccttagaaaaaaaaatcagaaacaaacattattacaaacaggtagcaaattagattgggcaaagatacacgtgtcaaccaagcaaaccccaacgcctagcactgcagacgcacggtaggagcgataggttatccgttttaatttttgtaataattctcatcttaaagaaaaaatcgattaggtaaattaaccctttcgctatataatcaaatattttaactatattgaattgctgaacaacttcatgacttggtgaattcatgcgagagtagccataaatttgtactccctccgtccgaaaataattgtcctagaaatgaataaaatggatgaatctataactaaaattagtctagatacatacatttctaggacaagtatttccagacggagggagtattcgtttatgttgtgataacaagtaaggcaaatcatttgggtgattaatgtcggagtcacctatgatacttactccctctgttccaaaatataaaaccttttaaaaattacactaaaaaactatatacgaagcaaaatgaatgaatctatactctaaaatatatctatgtacatctgtatgttgttcataatacaacatctaaaaggtcttatatttaggaacggagggagtacacaacaacgggcacacattgcttcgtcgacggtcagaaatcgacgggtattgcctacctaatatttactcccccgttccaaaatataagaccttttagacattccactagaagactacatacgaagctaaataagtgaatctatactataaaatatgtctatgtacgtccgtatggagttcataatgcaatctctaaaagattttatatttattagaaatgaagggagtacaactttgggccttagacacagaagcagtacaacggggcttaaaagagacaattcatatttgtcactttgttgacaaggtgtaaacctttcacatagagcgactatgaatgggttgctgcaattatgtctacatggaatccagtttttgaaccttctataagatgtttctttatttctatttttctttgttccattattttatttatatatgtttttaccattttatcttttcttatttttatttatttttaaaaatgtcaacaaaattgtttaagatttctaaaatattgtaattttttttaaaaatttcttaatttaaataatctttaaacaggttacatttttaaaaatgaagtaaaaaatatgaaaaatgcccacaaacgttataaaaacacattttttattttcttatatttttaataaaaatgttcatatgagattaaaaaacggttccagttctataaatgggttttctcatttttatttaattaaatttcgtgttttttggtacccaaaagaaaaaatccaaagaaaaatagaaaaaaaaatctaaaatacaaacgtgaacgatacataggaggtcccacttgaggccaccggatgaccatagagtttggtatgtgatccattcccttctaaaatctacactctcccatctccagtccagtctccacccaccaccaccaccactccccccacaccccgccggcgatcgcgcgatggcggcggcggccccccctcccgcggcggcgctggagcagctgagcaagaccaagatgttcggcggccacaacctccgcttccgccaccagagcgccgccctcggctgccccatgaccttctccatcttcctccccgcgtcgccggcctccaagctccccgtgcgtgccctaccccgctctccccgggaccttcctccccgtctccggcctagagatctgacggcgtttccgtgggtgtggcgcaggtgctctactggctctccggcctcacctgcaccgacgagaacttcatcatcaagtccggcgcccagcgcgccgccgcggcccacggcgtcgccctcgtcgcccccgacacctccccccgtacgtcgagcctcaacccacccctcctctctcgccgcgttcaatttctagggtttatgcctgcccgcccctagatttatgcattttagatttgggaattgggatgccgccggagagaaatggtgagatgtgctcatgtacctgcagttgccacgggctcaccgctaatgtttggactatcgtgcctgtttgctgtttcgtttagccaaatttgactgatatcaaacagggaaagtgtgatcggtaaatcatgctagttaaacttcaattgaaaactattacgattagttaaaagaaataaccatcgatccctcgtttgtgcatcaggttggcgttatatttgataggtttgacacttcaacatgtaactggctcaaggattaagttatgtgcttgcatatggatgcactcatgtctgtgttgtatagcacagggactatgaatggcataaatatgatcactaatgtggaaattgcatcatgccaatggtggcagtgcacagttgtgatactttgctggctaatcatcgacaactgtttgctgaatactgagttgcttcaaggcaacatgcattcatacactcatatgtgatgctaaaactgatgagaagtttgtagtttatacattgggtctgttaaacttatgcacccgtaaaggtgatgctcatggatattaccctgctcatattataggaattatgccagtttaatggttttatcttggaaatttcccacgtgcatggattattttataaaaaggtgtttactgccgtgggtacttggctgtgggtggtaattgcctcaggtctccatgtcataggtcacttctctgctgagtgtctgatagaagtactcttagaaattttgactgacccaacattcccattttcccatatctggagtgggtcaagttccatgctgtatggtacatatttatactcttttatgttggtagacctttagtagtttctaccgatattgacatgggaaaacttgtccattgtcatgttgctacacagtagattagtatgtttagcaagcccccatcatcagtaatctaaatatccactgatgcatcatatggaggtgaaggaaaaagagtaaccatcaaaggcatcttcctgacgcataatcacttaaattttagctgtttggttttggattattaaggctggagttttggaagacactgtaacctaacgaggccaacaaaaatgcacaatctgcctcttatccggggcatgtacaaactgcattttacaaggaaaaaaagacctggttgagttataggatatatctgctcagcctaatgatggagttgagtctgaataaaaagggcgttctaggttgatgaatgactgccatgttcctgatattctgccaatcaacaaaatgttttggttcctttgactaccaaataacatgtggaatgttcaatgtggtttcatctgtattgctttaatcacctttcttttgtcgagagcacattatatgattcttgatcctggtttaaaccttttcctttcttcatcactcttttcctttgtttcatgcaggtggactaaatgttgaaggagaggcagatagttgggattttggtgttggtaaggactgtaattaagacaatctttctgtgccatttgctgtttatatgatatatgacttgtcaatctccatggtaggtaacttactgcacgagcctctcattaccataaagaaatgaaatattataccgtttgctgttttttgtgttaaatttgtgctgctttgtttatatcatgttggttctggagcaatgttttatagttttgttagtttgttaaaaacatatgctcatagttactgccttcttttaagggaagctcatagttactgctaatatgttcttttcgtagatggaacctcttgcgagttgccgagaaaattagtatttagtcagcccatcgaaccaagattagtccttttatattttgacattgttgtatatctacgttgtcaaagctcaaccagaaagtaatttcattgtcctagcagctagcgatgacacactttatctcaaccatcagagtgccatatctttatattcctgattatgcaagatatacatctggtggattagagcttctttatctatgtcgggtctgataacatggttgccctttgccctatgttaacctgataagtcaaacatcctgtgctcttgaccatgtcaatttgacagatatgacaaaagaagcttatgtcgccatcaattttttcatgtcacgtatgtctgaccttaaagacgcaataattggatagacgttattctttggtcataataagatttctatgaatttgtgaagttctacacaagttctaaaccaattaggtaatattgaattcatgaatttgtccattagaaaatgcagctggtttacatttttgaagttcttatatgcaagctgtatcatgatgataagacttttgtttctatgcatgcggctagaggtgtctaacactcatatcttcactattcatgagtaggtgctggattttatttgaatgccacaaatgagaagtggaaaaactggcgcatgtacgactatgttgtgaaggagctgccaaaagttcttactgacaactttgaacagcttaacacgtcatgtgcatcaatttttggccactctatgggagggcacggtgcactcactatctacttgaagaacactgaaaaatacaaggtactgtttgatgctatttgttaacccccccagtatctgggaattcctgtctatgaacctttttcaaattaggaaacttgtagattggtgtctacttcctataacatatgtactctcatttattatttcatcgaatctcactcggcattgcggatttatcttacatatgcagtcggtgtctgcatttgctccaattgctaacccaataaactgcccatggggccagaaagcattctcaaactatctgggcacaactaaatcagagtgggaggcaagtcttctctgagatcatctccttccccacctccttccattctcaagccagccacacataatagtgcatgcttattgcaggaatacgacgcaacattcttggtcaagaagtgcaacacggtttcaacttctatcctgattgaccaggtataatgcaacagtgcgacgaatagcgtccaattcctgctttcactctatttctagctcaacgatattattggaacgagccacttagtgtgttacgttgcatatttcgattcgagtgtactgaactagcgacaaccgagcaactagtcatctccatgggcatgtaaggtaattggaaaaggtccctgggaggtacaagtgagcatgtcaatatgacctgttctcagacatttgtggcaacagggagagccatcctcctggtaataggatgtctgaaagacatgaaatcattttggttgttttgcctgctgcgcatgtatgattcagccatttccgtagccttgtacaccggatatgcttcgatacgagtacctcatcaagtgatggcctctactgtctatcctggttagcattggtaggactccattgcatgttcagtaagatggtatcgtgtcacagtatttctgtatcagacatgcttgtagaagttccattagtttagcatcccttatctgtcagggagtcatatgctgtcacgttatgattaattgattatgcgtgttcaactgaactgcctagagctgaagtttggcaagttagcgcaactgcatgaaggaaacatttatacataggatggacgataggttggactgaacataagatgaaagtaaaaggcgctagagtgtaaccgttcgcttgtacacgaattggctctgaaggatgtgaatttgagaacttggcactgtcatttttcatcacacagtgcgctatattcgcaaatctagaatactgtcacatctgcttttctgcattattttcttgcagtcatataaggttcagtacttttgctgatttgtgcagggagaggatgacaagttcctggcggagcagctgctggcgggcaacttcgaggaggcgtgcaagtcggcgggcgttccagtaaccctccgcatgcagccgggatacgaccattccttcttcttcatcgccaccttcatcgacgatcacatcgcgtaccacgcccagttcctcaagagcgcatgacttgccagtcacattcagcgatgttatcgctaaaatctcagcttgcaaatctgttttatcacccgtatgcgtccatgcagtctgtgtgtgtgttagattgagagacgagacgaaccgtgtggaaataacgtgcgaaacgcccgtgcgtcgcttggctgtaaattcacgtcattcggtagaatagccggtggccctgctgtatgagtatgagtatgagtatgactctggcgagggcatcgcgtttggtttaaagcgtgtgcggcaccggccaagtatcgggtgcttcccagccttgggtgttcctggtgctccaatgtcaaaaaaacgtttttaaaacaatcccggaaaataacgtaaatgttcataaggaacgtcactgaaacccctcggaattccaggcccaaaatcgaaatgcatattgagagaaagaaaaaagagaattcaagttgtgaatagcgccagatgttgtttttcctcatttcattccccccctcgatatgcacaaataaacaagtcgcgcacaccgggcccgtgcacggcacggcgtcaccgacccgcggcaagttccgggaaacttccgcgcaagcgccaaagcgcaaagcggggcatgccgcgctcgtgggtcgtggccgacccaccaccgtccgtccatcataatttacccctgccacaccagtccagacgcggcatccaatgcccccgacccagcagcccccctccccagatcggatctcaccccaccaccccacacccagccgacgcatggacccatgctttgcgcaggaccccacggcagcggctctgcccggtccacgcgccctctcccccccgcggttatttctaccggggccgagccgcgcttggagagggcagagtcgagccagcagtagagcggagagtcgagtcagtacctcgtcctgccggccgcccgtgagtgcctgaggagtcccgtgctcgcagggggaggggggaaggcgccggatctcgcggggcaagcgcgtccgctgcgtcaggtatacttcgccacttcctgatctgaatgagacctggttgccgattattggatctaccgcgtgtgcatctcaactgtgagctgctggtgacccgccgtagattcacatcgttacttttttccttgtgttctactccctccttaaactaatataagagcatttagattactattttagttatctaaacactcttatattagtttacagagggagtagtacgtatttccaatcgagctagatcgttcagctagggtgcgcatatcacccaccgtaggttttcttcagttctacaactatcatgtgcctgcttggatccttggtcgtctaatctagtaatcttcaagcaaaccgtgggcgccgactatttctacggcttgcccggccggtgcgtgcattttaaattcttaattagtatgctgtacatgggaattactgccatccacatccacggtaaattttacagagctcattttttccgtacgagacaatcccaggctttgctctacccttctatggagtagatctgtaattagatgtattctgtacgtccatatgcaaatcttggccatccatgatggattacagtgctaatctggtcctacagggcactccaggtcaccaaaagcttcttatgctgtggcctactttaggcttgccctaccctaggaagatccgtattagacacgccttgatgtgagaaagaaatgaagatgccattgctatttacctattaccgccgtttctgtttgtgctttttggtatgtctgtgcgatctcaagcctgaaatattatgttttacttctctaggttaacttagcgcatgattcagtattgtatttctcttcttgaaaatatattatactcttgttttgctttgtgtgctaacaacaattacaaaaacttccttttgaataggtaccttgctatgggatgaagtgaagagtggagagcgccttggatcttattaatcaatgcatcatattatgtgcacagtaagcttttgctatgctctcaccgttaatgtccactggttggatcatgcttctgtttatgagctcattgaagtaattctcttgtagctcaaatcggccaatttcttgtttgcgtggcacacaaaaccttcagctatccatctccatatctgttggtctctcttaattttgtagtcttctggaaatatgcttaggtataataaacgatgcgaaggtagatcatcaaacatgcgcacaatcttttaatctcaagcaagatggtgtatgctagcgttaagtgatttaacagaaataggaggcacacatgcatcaatactatgagaagtagcaaagaaaacaagtagaagaggcccttgacttgtagattatacaagagttatgatctataaggcaacccttttttgctagtagttttgatctaccttcccatcttataggattagttattatgtctaagcatgtttttagaagattagaagattaagcaagctcatttgatatgtaagtggatagtttgaggttttgtttatcatgaaaaacaagggattagcaagttttagctcggtggtagaattgctcaatgagaccgtgaataggagcatgattcaaccaattgacatcaatgttggtaaaggcatggaaaaatcttattgtatacatgatatggtgattgattccatatgtttctgccaagtgaagaaaaatcacttcaatggaagtgataacggtctgtccaaaagcaagatttgaagattatccatcccaaagtgcatgacaggtagcagctatgccacaagttaggtctcttgcaattgttgattcattgtagcttatgttgagtgttcagttctacatgtttgtctgtcctttgcaatcagaatgatttaagaacattgcatttgtctttgttttgatttttcttccttgcgcaatgacatgaagctctcattgtattgtacccacttatgctgaattatattgtcatgaagcttttagttgtagccacttatgttgtcagtcaagaaccatcaagtttatatgtgttggttccgcagttggctcatgatgaacttgtttttccattcctttattttgctggatgctggcttgttattctggagctcattttgcaaaaataataataattcaaaacatatttagaagtttcaaaaaatgtcagtttttttctacaaatacatatgcatattcttcaagtatgtataaattttcatcaattaatttgtttatttgtgtgctacacaaaatagacaagtatcataccaaatacaagaaaggaaaaagcctgtttcaatctgtgtactttttctttttttgtgtatatcgtatatgaatatatacgttcatgacattttatacatgtatactacaaatatatgtctacatgtaaactttttatcagatttttctgaggcgtggaaaaggtatttttgttgaaaaataaataaagagctctatagaatccggcctctgtttacacttttttttagaactctgcttacacttttcggtgattcactgtaaatttatagtgtttggtataagatatttatctcctaggttttttatttcattttttgtcttcataactagctcattgttcattattcattattcattattcattatttattgttgtcttctctttatgaagaacctgtatgcatgtgttgacggcttgccaactaatcattacaaaaacttcaaatgcataggtacttgagcatgggctgagaaatcacaaatggtgtggatttacaaggatgatagcccagacgaagaataccttattatttggctgttaccatacataattttatctctccgcaaaaaatatattagatcaagcatcatatcatggacccgataagctttcgttcttctcgtcgttgatgcctaccggttggatcatgcttctgtttacgagctcattgaagcaactctctcctagctcaaattgggccaaattctcctttacatgatacacaaatccttcggctatccatctcaatatcagctactctctctcttaaatttgtaatcttcgaaaaagatgattgcatataatagcggatgtgaagttacatgataaaaacaacacaatctttactcttaagcaagttgggatagactaagataaaacacaataggagccacacacaacagcagtatgaaggtacatgataaaaacaacacaatctttactcttaggcaagttgggatagaccagagataaaacacaataggagccacacacaacaacaatatgagctgtagcaaataaatagtaaaagaagctcttgacttggtagattatggcaaagggatgatctagactcaagcttccattagtaatagtctgatctacctcctcgtctatagggttagttgttatatctaagtatatttgtagaagattaagcaaggtcacttgatatgataatggatagccgagtgctttatttatcattgaaaacacgatattagcctatttgagctcagtggtagatttactcaatgaaatcttaaatagaagtatggttcaaccaatagacatcaatgttgatgaaggaatgaaaacatcttattgtattcatgatatgatgattgatcccatatgttttggccaagtgaagagaaccacttgcatggcactgagtgaaagcggtttttacaaaggcaagatttgaagactatccattcggaagaacatgtcagataagaccaccatcagaagcagcaatgccacaagtgaggtatcttacaatatctatatgtgctattgttgatagtgttgcttatgtcgactacctgtgttggatttagaatattgttgtatgtttctcatcaatggaggctcctgaaactcagaacactgcatttgtcttggtgttttgatttgtttttcttctgcaagtacatgaagctgtccttgtgattgcatctcttatgcctgaattctatcatctcttctatcgactcaagaaccatcaagcttcagcggtgcctcctatgtttagcttgttatatgaacttattttccatttctttgtgctgtaaggaagtgtgtgattatgatgtactgctagcagcttgctgaataattttccttgccattttgaatcttcttcggcatgaagctctcattgtgattgttcccacttatgcctgaattttattatcacttctgctgattgaagaaacattcagtttctgctgtgcctcttgtattttgcttatgatgaacttccttttccatttatttcttttgtaaggcagaatatgtgaactttgctatttattcgttttgtaaggcagagtatgtaattatgatgcactgttgcctggtttgatggctttgattatccattgcgtctctttcttcctagcagttttcagaatcgtggaatgaaaatatggccgttcagcttatacaatcatttgacatttcacctaaatttaagtgtagcggttgcaatttgttttattggttgccttgtatttgtcaccttcgttcaaatttggctgaacaaatggggagtgctaatagcctgaactgatgcagcaatttctggaggtaaatgatttggaatggcaaacaatgcgtttggaaacgaaaacctgtataagtttacactaatgtctccctcactcaatttctaatgatttctgattgtttttactctctgtatttctttacagagggagtacttgtgaaaatttactctgatttgcatgtcacatgcttgcaaattagtcagctaatgttaccaacagccgatgcccattgctctatgcagttgcaaccatctttgaaacgggtctaaatatgccatttcctgaggttcttccagcaacgtagcgcgtcgcctcctttgaggcgaatcgggggcaaccctagcgtcgccgccgcaccttccccctccctctcccttccctctgccgttgtgtgagggcttccgccgctcggttgcatggccctgatgaaggtggtggcggggatctggcgcctccgcttggatgaagggcctcgactccttgaggcggtggccctggccggtgggtgcggtgcggccggctgcattggcgggcgctggtgggcagcctcccacgaccgtgcgggcggcgtggaggctgcaggtgaaggtgctgaggcggctccccgtagtcctgcttttctccctgaagaagctcggccccactctgatttgccccgatccttctcggggttggcccttgatggctaccgccgtcatcccttgtgccggcttggcggatctggcgagtggtgaggttttaggggaaacccctggccagcgtggtggcctccccaaagtcgacgccttttacgccggtccccttccttgagggtttgggatggaccctctccctttcgcctcctccccgagctttggcgaaagttgacgttcccctgttttggttgtcgacggcacccttgtgttgtgctccttcttgaaggcgacggttgggaactgctcttggtggcggggctgatgatggcgtggtggcggcgcatgatggcctggcctttgtgttgcattctgctcggcttcgcccgacgctatctgatgccgtcttgggtcttatttgtggtgctaccttgatttaacatctcatgtccggtgctttgctctgcctctgttggtgatggtgctctcttgggtatgttcctcgtgctcctcatgtggcagctcggtcaccttgtgttgggttcttgtgggagccactttcggttgcatgtgcgacacccatcgagcctgggtgaaagggtagtggccctttgcgatgacggagacaactcaagtgttgcccaaatttggcctatggatgcagccaacgctcgaagctaggtggtgtggggtagtgttggtagtgagcattgtggcttagtgctttggtcctagggtgctttgccgttgtgttgttctacattgtgccatgtatgtttactttcgttttactctgcttttattccttgtaatatggtgtctctgtaattctgacaggttgatggctttgttaatttgaagttgggttaggttcaagctcttttcgggcttggtctgtgccttttctctaaaaaatgtcatttcctttttctctctcctcatacacatggtggtatgtgattcgttcgctggtggtgtaaagttgattcgtccgcaaggatgttaattattgttcccgcatacagaggagggatctctctgcacaggacaatcgacgcacacaataatggtcaccgctggtttcttcctactaattttctagccagcttaagacatttctaaccgttctcctaaaaataaaagagaatccgacagaataaagctttgatggaatatttttacttcatcaagtttttgccgacctaaccgaccccttatatataacggagtaaaaaacaaatttgcataaaattcaacatagatttgatttaaacaactgaaaattgacataatgtacatgtactcaactgaaatttgcacaaagttcaacataatttctattcaaattaaattttgatggatataactttagtcatctgaacgttcttatattcctttagagagggagtattcatcaagttggcttgatcaaatgaacggctgacagtggcggaccagcaataaaatgaagggtgtgcctctgtgtgacgagcctctcgctcgctcgctcgctcgctcaggatgggctaggctgaaatcgacttgggccaaaaaatcatgtggtaaaaaaaaattcacaaatttctgggtgtgccagggcacaccttgcacacacgctgggtatgccactgttaatgtcagcagtgtcatttcgatgtgaatgcacggtctcgtggctagttaagtcatacatacaccattgagagcaccaactatttacttccccgttcttaataagacggatttatataaaatttgtattgtgcacagcctcggtaagcacttttgtgcgttaattcaaattttatatgaacacgtaggcaaatatttatggaaaatatatattaaaaaagcatttaagattactgctgttgtgttcaggaggttggtgcccgagcaaaatagcatactcgtggttttgaatttactagtatagtgcccgtgcgcaataaaaccataacttgcttgtatgttattatatgaacaaaaaaagtaaacataatttctcaagtaaatttatttgttttatatcgatcatcagttatgtgcaatgtttctacggcaacctagactacgacatagttattcaatgccagattataaaagattataaacaaactgataacatcaattaaatattgttgagctcaatatttctcgtgctttaatcaaattttatttatcatgttttactaatttacaatgcaaggactttttgctgtaatataatttttctatactatcattttagttagacgcgtgcatataatttttacatacaatcatgcattatttgaataacatgaatgttgaatgccacctaggggaagttggtggcgtgagctctagagtgctagcgacccattaggtccaagtagaccgggcatatgtcgggccggaccgggctagcctggcccaactgtcaagcataataaatcgggcccaaacccagcctgagcccataaaggcccggtcagcccggcccgaatgtggctaaaaattgaatttgtgcaagcccgagccaggcccgatgtgcctctcgtgctcattttccaggcccgagcccaacctgatggcatgatcaggcctggcccagctcgggattctttggtcgggccgtccaagacatgcttcccatgcccaggtataggtccaagtggtcagccgtgcctagtcacagccaaaggtcaagacacaaggtccatatggaatggcgcacgagcatggccggagtctaagctactggatgtaggcagaaggagggctccaaaggcaggacatggcgggattttataaagagagaaggagaattgagagaatggggaagagtgatcctatgcatatgatgtttaatgttgacatttgtacgaggccaatcatgcatttatcctcgcacttggctgttctacgagaaaaaaatatagaaaatatagatatcgtgtttaaccacgcggtgtgatatgctccaggagaaatatcaatcaggaattagaacacgcgtgaagatagtgactatataatagcccgcatgattgtatgaacctgactgcattttatttactacttcctcccttcgaaattacttgtcataaaaatagatgtatctagatgtattttaattctagatacatccatttctttctattttgacgacaagtaatttcggacgaagggagtataaggtaacaatatgtttttttgaggggttccaggtaacaaacagtgtgtgagagaacagtgcctttattttatttatcaggtaatgaacagtacgatctcagtgaattggttgtgtccgttcaaacagctggcataattttttaatatgtgtgaacagttcgtgtctctacaaccgatagaagacataagaaaacgtgctggtacgttcctgtaataataggttccacgtgtggaaggaggaggtggatgagtgaactcaccaccaactcaaatctttagaagtagtaaagatatattttctaaaattatccatttcattgacatccctccaaccaaatagagagatgagccaagaaaaataatgatggtatctcattcatcctagattcctaatccttccaacctaacaagtatgccacaagtggactcaaaaattgtcatacaagttacccatagcaatgctgatgtggagtttggatcactcataatcttgaaattagtttagtttggaaaacaagaaaggtactcgatgtgcacccgttgcatgtaacagctttggcagcattttgaggttgggtccagttggggctagactgtgtgatccgtttaattcgagctgcagttttgtcgacagcaacgtgtgatgccatagttgctctaactcatctacatccgggccttttatatccgtctcaaatgtttaggcacgccatccggtcactcaccgatcacggaattatgattcaatcggacactttaaatggacctcaaacgtccgggctgaccgtcacccctcatatccagcctaaataagaggccgatatggaggcgttcaggcacgcccgggtacgaacggcacatcagcctggcccgcctggcacgcgttgaccccacaaaaattcattcccatcgttcgttggaccaaaccctagccattttactccactctcatccattcccacccgccacacaagctcatctccggcgatctgtgcccttccccggcatagctgacagcggatctaagtcctttaactacacatccatcgatcacgaactcatcccacacggcctcgaggatgaggtgtctgtccggcttgcgctcctccagtgctgggaggcgaccgcctgacggtggcgctcggacctgtgatgtcaggaatccattgcgtcgacacaacctattcttagatccggcgtcgttggctcacccgaggcggtgcagtccgtctggcatccgagcgccgtgactgaagcccaaccactccgttggcacgccgaggatgcaacattggcgctcgcggatgctaacatggcgcaacgtgtccgtcgtgcgaggcagcaggcatgggagacaacggaggtcctcacgacgatggatgttggaacgggaggatcacactctccggcgcctcgtatgttgcacaggtgggggcgccacaaccgcatcgtggtggaagtgggctcctcccaggaaggatccctcatcaatctcacgtccaccggcaccgtctgggttacgggctctgacaaggaagagtagaccatggaagatggcgggagctcgagtcccgtgagctggctagtatcccatgttctattttacctcgcctatgaccagacctatactccgaggagtgcagccagccgccaaaaatgagcacggcggagccggacgagctccacttaaagatcgttttacattgcatgtaataatatggatttgaggtttaccgaaataggctttcgccctactatattgatatagcaaccactcgatacaattgttggggcattagcacaagcatgcccaaaagaaacagaagagaaactacagagagaaaatgccaacaacgtcggatcaacgaaaaaacgaagatgactagcaaccgctgcgcccgccggagaattccaccgcgctcctagcacgctgaaacgccacctaccaagcaacaccttcaagaaggaacgcgacgactacgacgttgctacccggaaaagtcctagggtttccccggtacgctagggggcatgggggaaggggtaaatccgacgcccttcaggaaggtacaacggtgcccgcggccgtcatcgcgtcggtgccggacaagccgacagggatttctcccaaccaccaaccaaccacgaccccagacgatccttcgcgctccaccatacttgtcgcccaccaatatgtgccaccacagtcttgcagtcaccatcgccgtctcaccgtggaaagcaaagcgagatcgacaggatcaagagggagcagtcgggaacggggagcgacaaggtcagaagccacacgggaggggacaacctccaccaccctaggaagcaaaccgacacccctgcctcggcggtaaccaaccggactcaaattaggagcaaaccaggcacccctacccgacggagcccgaaacgggctcgtgaagctccagctggtgccgcgttgcagtgcgcgtgccgttgtctccaccccccagcacgagccacacctccgtccgccggagacgacggcaaaaagcccacgccaggcccacccagacccggatggggcccaaacaggcctagatctgggccggaagggcgccaccgccagccatcgcaccgcctcgcagccaagcagccgcaccaccaccacctcgccgcccggagctgcgtcgcccgcgaggccgcgccacgtcggatccatcgccggcatgtgtgcaccgccatcagccgccaccacttgagctgtcgcgctgcacgggaggaaaaagcgggcccgctgccgccggcaccatgcgagcaaggcctggtggccagcaccgacggcgacgggagggggttaggaggagggagtcgctctgggacgaggagggaagggcccccgatcgcctcgctcgggaaggcgatgcgggggatagaaggagcaggggtggtgttcttcccgcgagatttgaggtttttaatttaagatatccgattgtataatgcattatgtgaggcatgattgatcagtgttcatggacgcactcagacaatgtcgaacacgtccatgagtgtttaagaacaagtacaataaagccgactcagctgactataaaaaataaactaatatatttttgcttagttgaaggaaagaaaagtggagagagaagataaacgagctcttagttaagagccagcagtagcacgtgcttataggcattatgtgagaatgaaaattgagtcatataataaaaaaaatacttttctaatcaaattattatatatgttggctataaaatagactataaatgatcgtgacaatgtattataatcgggagctgctattaaccatgctctaaaagatcagatgcttttacatgactttagcacggtgtgaatggcttggaccctcgtaccatgctcaacgttaattcccatagcgtcagtccagcagcgggcagcctgtggtgcgctgcacatgaccagaccaggggccatgtctcgggctaatttttttaaaatattatttcttttattttttttgaaaaatattgcgtagatttaatttttttgaaagtatggctgcctcggtccaggcgaagccgactgtaggctgtcggcccacgtgcagccgataggggcctgtcggctctggcgtagccgataaggctccagtcggccacgtggtgctcgactagtagccgggccacgtcgctcttgcgttgtcggtgggaggggtggcctgtcggctttgcccaggccgatagggatccagtcggccacgccctggccgattagtggccagccacccagccgagccggcccctttctcctcttcttcttcctccttcttccttcctccttctcccattttaccttatctcctttctctctttctcctcattccttctctccccacataaaaaatcttccattcttcctatttatccgtttttttacattttgaaccgtagttttattgtgtaaggaggagggcagccaaaccatccgtctcactcgcgatggggtagtttgtggtgcttgttttgaagctttttttgatggtggtggtggaggttgaggtggaggttgtagtggtggtggtggtggaggtgtgggtgaagttggttgttttggtggagttgaaggtggtggtgggggttgctcgttcgtcattattctcggtgttcgtcaagcgtcgttcgtcgttcgtcgtttctgcgcacgcttcaagggtaaaatgtttttagtttagtgaagtaagtagtttaggacatattaagtttagtgaagtaagtaatttagtgaagtaaatagtttagtacatatttagtttagtaaaataagtagtttgaaaatttgtagattaggacatatttagtttagtgtattaagtagtttaaaaacttttaggtgctcctttagattaggatatatttagtttagaaaatttagtggtttaaatagttttaggtggtccggtagattagtataaatttagtttagtaaatgaagtactttaaatatttttaggttctccgatagatttggaaatatatttaggtttgtccttcttctaattttttttccttgttgaataatttgttaggtcagcggagatgtctgatttagtgacgttatgtttgcactatggtcctggtaccgttcaaacaaataagatgggagctgatcttagtgaatttcagtatactgaggtgcaagtgtcctcccctgaaacatggtctgttagtcagttgacagaatggcttgcccgatgtttagggttcaatattgaaacacacaccgtcgatgttcatgcattatggacccggtccagtgcaaatatttttctggtatttgaagcatatagagcgggacgaccagtgggtgcactggttaaaagcttgcgagcgtaggggatgtaatcctgtggccttactgctccccgtgctaaagccggtgagtgaacctcaagccgaaggtagctatgagtatggtcagagcagcgtagggatggatgattcgcagtcaattcatgcgtcccatgctggagatgatgtttacgaaacagaccagagtagtcaggcagaagggggagatgcagatgattatgtcagcggcgaggcggatgctgatgagatagatgggcacatgcaaaaccagatgcatgaagaagatatggaaggtgatatttccgatgattccgccgagtcagatgaagaagtgaacgcacatgaagtgcctattcctgcatcatgaaatcaggacttctcatctgcaatgttggtgaacgacggtcatgattctgcgtgggagtatcaccagaacaacattgcgacaggtgccctctacccgaataaacaagctctgaaggatgccatccttaattggacaatgtccactcaaagggtttttgtagctcaagtttcttgtccgaaaaacttgacaatggtatgcagaaaccaggattgtcccgcaagggtgcatggctatctccctaagtatggcacaagctgggtcataagtggcatagttagtcataattgtgttattccgtgtatccctcaagatcatcataaccttacttccacgatgattgctcgcttgctttacagcgagatagtggagagcaaggcgatggaagtgaaggctatccagagaaaagtattcgtcgggttcaagtacaacatatcatatggcaaggcttggagggctaagcagaaggcacttgagaccagattcggttcgtattttgatgcatatgactctgttgtttggctcctccagacactgcagaaccggaatcctggcacctatgttgacatccaagacttgtacctgccagagttcccaacggttagggtgttgcatcggttgttcttctcttttggtgtctgcatcgaagctttcacacattgtcgaccggtgatatgtgtagatgaaacttttctcactggcaagtacaagggtcagatcctggacatggtttttcaggcagttgaaaatagcagttgtgcaagataagcagaatgtgtgcatccttcatgacatgcatgcgggtatactcagcgcgatcaagacattgtcaaaccctgcttccgatgaacaaactccttggcaggacattcagagccgttggtgcatgcgccatctaggtgcaaatttcttctcgcagtttagaaataagaacctcatgaatctattcaagaaactttgcaagcagaaccaacaatggaagtacgagctgatacgtaacagactaaatgtttgcacacagagatatgttagggaccggagagctgcaagagatgctgctgtcagggcacatgccgaaacggtagctgcacaactagcaactggatctgccaccatggaggaagagccggttgggctttgtgacttgtcaggatttgacccgcctagtacaaggagaaggcttacgaggacgattaaaacctttgatcagtggatagagcatgagtcgttggagaggtggtctctattgcatgacacatatggagcgaggtacggtgtcatgactaccaatctgactgaaacatataatttcgtcctcagaggaaacaaagctttgccacttacaacgattgtcgagagcattttctatggcacagtgaagtatttaagagatagacgtcaaagtgctgcggagcatatcacaaacaatccgaacacacggtactgtgaaagggttatgaagtacatggatgaaaagatgaagaaagcccagtcacacagtgttgtcgccattggaaatctagagcgaaggttcgaggtccgcttagctaacaacaaatccggatgtgcaaatgcgatgagaacgcatgaggtgaaaattggaaatgaattgtggccaacgtacgagtgcacatgcaacaaaccgtagttgcttcacctaccttgctcgcatgtacttgctgcttgtgggctgataggccttgacgcaatctcatttgtgtcttcgtattttttgaaacaggcagtcctcaatacctggacaggtgagttggtgggtttccgatcaatgggtaacttcaatactgttgaccctgctcaaaggcgatacattccgcaccctgcgaatatgcgtacgagtagagggaggcggcagtgtcagcgcatccggaatgacatggatgaatctgaggcccgcggacaatgcattctatgtaatgaatttgggcatagggatactgattgtcccactttcgtcactacaaggggcactaggcgtggacgaggcagccggggaagaagaggaggaagaggggggccaagaggaggaggaagagggggtgcaagaggattaggaagaatttaagatttatgtaatgatggcaggagtgtaagactatgttttaagtttgtagtagcactatgttttaagtttgtagtagcactatgtacaatatctacaataatatctacaatgtgttcattcctgatgactgaaagcataccggaggactgatgtacggtgaaggagcaacgggtggatcttcctcataattgacgcacataaaaaacttcatgccaaaccaaactgaaaaatcagtcacctccttcaccttgcaaagatcaccgcaccaacaacgaactgcttccactcccgaggcaaactcgcactcttcattttcttaggcctgatgctttgatccgagcaaggcaaactcataatgactaaagcggtagtgttttcaagtgtggctggatgatggaggaaggcactccagtgtctccttttatagactcggttgacaagggcgatggcgggaacacgaggaggaaaatgaggcgggaaaaatttggtgggaaatgaggtggggaaaaattggtgggaaaattaggcagtaaaaatttggcgggaaaggaggtggagaaaaattggcgagaaacgaggcgggataattttggcgggaaagtaggggggataaattggcgggaaacggggcgggaaatgaaatggcgcgaaagtctcgcgggaaatggagcgggaaaggcggtgggaaaaaattggctggaaaataagggagggggggataaattggcggcaaacgcggcgtcaaatgaagcctgtaaatattacatgcaaaaaaaattccatgcacttattggcctagccagcaccaattagtccttattggtcttggctaggccgacaggaacttattagctttgccaaggccgataggcttccagaatgcaggccgagaggcctatcggcctagcgaaggccgattgagacttattggtcttggctaggtcgaaaggtcccagtcggccactcctaagccgaggctgcaatatttttcgaaatttttgaatctgcgcaatatttttcaaaaagaataaaaaagataatatttaaaaaaaaatagcatgtctcggccaggtcggttggtggcgaaattaaaaggctttgtgctgctcacaacgtttatctcttccttgcacagaacaaacaatcattttgatctgaaccaagcttatcttgggagtgggacggtgtgggtggagtggcgtgggcgggtttggggtttcgcgggaagagagcacggcaagccgaaactgggaggggtgcggcgggccaaatgacggtcctgcccttcggattggttctccgtctctacctgttgtggattttttttaatgccgtgcggtcgtggagtgacttcttgagccgcgcggtcgtggagggacatctctttcaggatagtctcgatgatgggagtgagcgaagcgtgttcgtttctccgcttgagccctcccgttgctcctgactaacgctgtggctggttgagctgcatattttaaaaaaactgctgtgaaaaagctgtaagctgaaaagttaggataccttagttttaaaattcacactataaagaagctacagattttcaaaagctactttgaacatttacacctttgattagcttttagcttttcaaagcaggagttggtaaaaaaagttaaaccaaacacagcctgagtgcttggagaacgtaaacgtcattggaggcagcatcgtggctgtctctgtctcgttcgcgggagttgtctgtggagaacccaggggctcccctggccgtgtcggtcatcagaacttctgcagcgtgcttgttactctcgtactcggatccgtcgaaggaatcatcgcacaaggaagggagcaagcaaagggtgggctcggcggagtcgagcattgccacctgcacagctgtggtgtgaagtgtcacagcacacttgatccatcgctgcagtcgtgagcgcctatagcgggccgaacggtacgggaccgacggagtgagaggaagctgaacggtacgggaccgacggttgtcggaggagaactccgtacacagccgtgctgaaatgcgtcacgccacgggcgggtagcgcatccgtgtccaacggggcttccggcagtcacgcccaatcgtgagcaataaagctaaggaagctgaacacgatcttcccccgagtgtcatcataatgaccgaaaaaaatgaatctccacctgcgtcggaatttgctagacatacaacctcatgatagacgtcaactctcgaggaaacgaacctggcaatagcactaggatacgaatgaatgacgaagcctaactactacactggtgtgacactcttatatttctttaagagggagtattcatcaatttggcttgatcaaatgaacggtatgtcaacagtgtcattttgatgtgaattcacgggttcgttgctagttaagacatacatccaccattgagagctactccccgttcttaataagatagatataaacaaaatgtgtactccttccgtttctaaatatactgctttttaaaggttacattacggaccacatacgaagcaaaatgaatgaatctatactctaaaatatatctatatacatccgtatgtagtccgtagtgaaatctctaaagccttccactatgtaatcgatgcctaatgcattaaaatattatcggctgggcagcgatgtcctaaggattttatttggcatcgatctcacaatgttgtgttagtagcccgatcaaaagtggaacccaaatgctctattcacgtgaaattttcacccttgttagctctctgcagtgagccatgagctaaatattctattgctttctgcatttggcacccgctggacatgggagcaactacttactccggttccctgaatttttttatggcactacctgaccaatgaagggcgcaccggtgccaaatagatcaaaaatagatttggcaccacttttggcctatataacggagggcctaaaagatcatatatttagaaacgaagggagtattttgcatgtcatctgataagcaattttgtgtgttaatttaatttttatatgaataagtaggcagatatttatagaaaaatatgtatttcaaaaatagcatttaagattactgtcgttgtattcactagattggcgcccgagcaaaatagcttgctcgtggttttgaatttatacattttctgaaatttcccatttaaatttgacatcccttcaacaaaatagacagatgagtcaagaaaattaatcattgtatctcagccatcctagattcctaattcttccaacctggcacgtacgtatgccacaagtggacacgaaaattgtgatacaagttaccgacggcaatgctgattcggagtttagatcaatcatcactcttgaaattaattagtttaggacaaagatgggaaggagtcctttgagcccaaccctctccacccaatccgggtccgggtccggaaggatcaacaagtgcttgggtacctcctcaacaatctctccaaagaggtgttggtgcaggtaactgcgatcaccacggcgcacacgctttggacgaccctagcggccatgttttcctctcaatccttgagccgtgtgaagaacattcgcacggccttgcttcatgcgcagaagggaaaccagtcgatcgccaccttcttcgcccacatgcatgaccttgcggacggactcgccgcggccggcaaaccctttcaagacgataagatcgtctcctacatcatccacaccctcgacatggaatatcaacctttggtgtcggctctcgatgcccgcaccactcgagtctccctcgatgtgctcttctcgatgttgagcaacttcgatcaacgtgtcgctctctaccagggatcgggcggattcaaatcctccgcgaacgccgcttctcgcagccgtggcgggcgccaccgcggacctccacgcaaccacaagtccacaacatgcctggaggcggcagggaaaactccagcaactacacccctcacaccggacgaccctcctccaagagatctgccccgggttcggcacctgcaggtgcggtagacgctccatatatggcatcatcagactcgaccgcaccgcgccaaccattgtccgccactttgcggtctgcagttggccagcctgacacgcgcttccccgacaaaccgtggtgttacaagtggcgtgatcagcggcacccgacaggtgtggtgtccggtgcggatgagcagcaggagaggccaggatcttctgcaccctccaccatggtcggacagaagcccgcagccaaagaggatcttgcactagaccgagacgaaggcacgaagctctcttggaatcaccaacgcccagcactcgtgtgggcgcctccagatcttctgcatcggctgatcctgctgcaccagccccacgtctcaccagattgcaaaagggggtaattcaaccgtaaaattataagcacataaccaaatatagtcttgtatgttctacaggaaaactaggtaaaccgcacacccttgaggaggcacttggtgatgataaacggaaaaaggcaatgaaagaagagtacatgacactagagaaaaacaacacttggcatatagttcccccaagcaaggtaaaaatattattgattgcaaatgggtattcagaatcaagataaaatctgatagaactattggccgctacaaggctagaattcttgcaaagggcttcaagcaacggtatggcatagattatgaggacacttttagtcctgttgttaaagctgccactattcgttttattttgtccattgcggtttctagggttggagccttcgacagctagatgttcagaacttgtttctccatggtgttctggaagagaaattatacatgaaacaacctcctgggtctgaaaacaaaaataggccttgttatgtatgcaagcttgataaatctatatatgggttaaaacaagattcaagggcatgttactcacgtctctttcacaagatgcagacacttggttttgttgcctcaaagtctgacacctcattgtttatctacaacaagtcaaatacatccatatttgttcttatatatgttgatgatattattgttactagttcatctcatgaggcaatcacaggactcctgaaggacctgagtagagactttgctctcaaggagcatggaaatttgcactattttctagggattgaagtgaagaaacatgaggatggactttatctctctcaggaaaaatatgcagctgatctagtgaaaaatcctcgcctgcaagacggtaagccctcacctactccattatctagttcggaaaaactgccccttacaaaaggagaactcttgaatcaagaggacagtaccagatataggagtctagttggtgcacttcaatacttgactctaacaagacctcatctgtcttttgctgttaacaaagtgcgtcagtttcttcatgcacctacttcagttcacttgactgctgcaaaacgcatcattagatatgtcaaacatactttaaatgttggcctatatttcattaaataaccatctacccttgtcagtgccttctctgattcagattggacaggatgcctggatgttaggcattccactggtggttttgttgtattctttggacctaacttgatatcatggagtgcaaggaaacaagcaactctatccaggtcaagtagagaggtagaatacaaagctttggcaaatgccacatctgaaattatatgggttcaatctattcttaaggagcttggtgtgagaaccatcaaagtccccttcttatggtgtgataatcttggtgctacttatctgtttgctaatcctatgtttcatgccaaaaccaaacatatagaaatgatttccactttgtaagagaaagagtgaccaacaaataacttgataatcggtttgtgcatttcggagatcaagttgcagttggattcaccaaggctctaccagtaagaagctttgaagattttaaacataatctcaacttgatgaagttgtgattaaggaaggctgttaaacgcaataggttgttacggctagagatagataggccacggctgttagccggtttttagctagtttattttctctctatctcttgtaaccgtatcccttatctcttcctccctaagtcatgatctcaacaatgtaatctcaacaatgtatgcgctacagggaggtgcgcccctgcctataaacatgcacgacgtcccaccaatgaggtaagacgtttttcgcttatcgcacagaccggtcacaaaaatgcgaccctaacgggtccctcaaaccggcctcaaacgtccaggctgaccgacatccccatttccacctcaaatatgggtcggatatgggggagcccgggcacgcccgcctagcccgcgctggcccgcatctactccacatatattcgtccccatccgctcgccggaccaaaccctagccacttcactttactccgctccactcccatccgccacccaagctcaactccggcatggcgggcagcgaatctgaattcttcacctcaagatccatcgatcacgagctcgtcccacgcagccccgaggaggagatggccttccggttgtgcttcgcctctcccaggaggcggccacatgacgacagcgctcagactcgcaatgccgggaatccattgcgttcgcacaactggtgcttggatccggtgtcgatgcctcaccggaggtggtgcggtacgtatgacgtccgaacactatggcgcaagcgcaacccctccgttggcgcgccgatcacgaagcatgaccatcctcggacgatgtcatagcgcggcgtgctcgccgagcgaagcagcgggcacgggatgtagcggtagttgttggagatgcagagtcacactctccggcgccccgtagggtgctgcagtgcgggcgacgcaaccacgtcatggtggacgtcgactcctcctaggaaggatccgtcatcgacctcacatcgattggcaccgtctgggttatgggttccgacgaggaagagtagggcatgggagacggcgggagctctactcccgtgagccggctagtgtcacatgtcttacactacctcgccagcgaccggaccgacactgtgaggggcgtagccagccgccggacatgatcacggcggagccggatgagcttcgcttagtattatacttatgttgtatgtaatattatgtatttaaggtttttaatttaagatattcagatgtggaatttattatctgaaacagtgacgtgggcatttgtagggccgaatttataagagcatctccaatagcatgtctatatttggatgtctatatattcatatagagaatggttccaaaagattcccttgtatacacatccagttttgcagcagaacgtctatatatagaacgtgtatattctctctcctatattttaataatattttataactaccaattcaactaccattttataacctccaacggctctattccaacggctctattccagtcctatatatacgacccattctcacctctcttaaatcattccatcttgtgcttctctgatctcttttccaagtcttgtgtcttctctcctacaacacaatgagtgaaacaagagtcattttggatatgctcatgaattcgtcgtcgtcgtcttcatcggaccatgacgatctaattcttatagcatttgtagagtgccaggaggaaggggaggcgactggtcgacttcatggcggttcgacgctggggcggcattatttgtatcgcggaagagatgccggatttgttctactccgggacgactacttcaaagaaaatccaacctttcccgaaagttactttcatcgaaggttagtattacaacattattctctatctgcctatttgtcatctccctatcttatatttgtttatacgcataggtatagaatgtctcgtaatttgtttaatcgcatagctgaagcagtccttgagcatgatagttatttgaagcaaaaaagaaattatgttggagctcttgggttgcatcctctacaaaagatggcagccgcaatgtggctactaacttatggatatgatgctgatgccgcggatgagtactgtcgctcaggagaatctactaatctagcaagttgcaaaaagtttgtgatagctatttgtgaagtctttgggaaccagtataggagatctccaaatgaagaagatactgctagattacttgagttaggggagcaaagaggttttcctggtatgttagggtctatagattgcatgcattggacttggaaaaattgtcctaaaaaatggcatggcatgtttagaggtcatgtgaataagcccacaatgattctggaggcagttgcttcgaaggatctttggatttggcatgcattctttggtttaccagggtctctcaatgacaaaaatgttcttcaacgttcacatgtgtttgcaaagctaaccgaaggggaagctcctaaagtaaattataccatcaatggtcatccatgcataatggggtactaccttacagattgtatatatccatcatgggcaacatttgtgaagacaataccagctccacaaggcaggaagaagaaacatttcgccaaaaggcaagagggagccagaaaagatgcggagagagcctttggagttctgcaatcccgttttgccattgttcgggggccagctaaggactacaactacgaatatatgggagtaaaggtgaccccatctcgtactcatgcggaacagccgagtacgtttattcaaatgaatcaacgaatcacaaacaacgcatttcactctctgcttcaagatgatctagttgagcacatccgacagaagtttgaagatgaatagttatgtagttgaatcttatcatgtactatttcagttgtagcaatgtttccaataaacttgttctgcttgttcagacgataaatagttaacatgatacataattcacacgataaatagtttacatgagaactagttcacacgacaaacctgatgtgttctatctggcacttgtgttgatacatcaaagttcaacatcttaagaaaacactcatcgtcttccatctgcaaaaaattgagaaaatacacacacattcagtgtcgaatgcaaatgcacacattcaggtataaatttaactaatttgagcagagcaggaggagctgcctcaggcaagccaggagccaccgagcaggaggagctgcctcagcgcgggcggcctcagcgagcgaggagccgccgtcgccctcccccaagcgccggccccgaccagcgacgcccccctcccccgagctcacgcgtcgcgacggtgccgcacccccccacgcccccgagctcgcgcgtcgcggcggcggtccaccccccaccccccgagctcgcccgtcgcggcggcgccccaccccctgtccccgagcttgcgcgtcgcgacggcgccccacccccccccgcccccgagctagtgcgtcgcagaggcgccccacccacccgcctccgagctcgagcgtcgcggcggcatctggatccgtgacgtactggcgtacctggacgacggcgcgagacgacgacgccctcgcgatggcgcgcctcttcctcgtctcagcgcgaaggaggagctgttggctgtggacgacgggtcgacgatgtccagggctggacgtcgtggaccttgatttggaggatgtgtatatttagacggccgtatgcacgagctgttggaagagcatctctagtggaacgtgtaaatttggacgtgtatatcttcatatacacgtccatatacacctccctgtttttcagtggaacgtgtatacaggacgtggaaatcaggacgtgtatattccaacggctatattttcaaacggctatatttccaggttacctatactactttccaggttacctataaactttccaggttacctatactactttccaggttacctataaaacttttcaggttacctatactacttttcaggttacctataacacatggctgagattagcacaagcacttgccactgaagaaatctctacatcttatcccagtttccaaaatgagtagaaaagcaagcaacaggttcagacaacaggttcagacaagagtagaaaagcaagcagacaacaggttcagcaacgctgcatagctgcatcgctgcatcgccaagcagcagcagcagcgggttcagcagcagcagcagcccagccaggttcagtgcagagaggttcagtgcagagagcttcagtgcagtttttcagtgcagagaggttcagagagcttcgccgcattgcagccgtctccctcgtcgccggcagccttcccagtggcatccaagatgtccatggactcgagggtgcctccctcgttccattcccaccgctagggtgaccggtgggccaccacagcgacggccccaacctcgtctccggcgagtacccggagccgaagccctgcagtggctcaatgcttccccgccgccgcgcgccgcagcccctccgccgccggcagcccccgccgccgcgagccggctgcagccccagcccccgccgccgccccagcacccgctggaggccgggggagctcggactccgcccgctcgtcaccgactccacctgcgcgacgggcctccgcgggcgcggactcgtcctcgctgcgctcgaccacggcaaggagggcatcaaccacgcgggacgacgcgagcccacgagcgtggctggctcgtgtatccttccacgtctcctacacgtcgtggcttgctcgtggatgtttacacgtccctttacacgagccgttgggagtcgttgggctgtaaaaaactgcccagatcatgtatatttagcatacacgtccatatacaccttccactagagatgctcgaagcctttttttttatcttcgatcgtctaaacgaatactatgaacaacgcttttagacgagttgttggagatgctctaagatccggctgtagatgctcttaatccccaccgcgtcagtctagcagccaccaggtttgtgctgctcacaacgtttatctcttccttgcacagaacaaacatttgtagatgctcttaatccccaccgcgtcagtctagcagccaccaggtttgtgctgctcacaacgtttatctcttccttacacagaacaaacaatcattgatctaaaccaagcttatcttgggagtgggacggtgtgggtggatgctcttaattccccacggcgtcggtccagcagccaccagcagccaccagcctgtggtgcactgcacatgactggttggtggcaaaattaaaagcctttatgttgttcacaaagtttatctcttccaaacaccgagcaaacaatcattgatctgaacccatctcatcttctccagaacaaatacactccgaagagaggccttggtaggaacagcacacacacgaaaactcaagtctgctctcgggctcatctgcttcttgtcacaaaaaaattaaaataaataatagaaaaaatttaaaaattctaattttttttcgtggtagataatttgatgtgtgaggtccgttttaaattttaacttatttaaagatctgagcagctctcgataaaaaagacaaatccggtcaaaacagttcatgaacagctaaccttttttactgaacccgatatattttttgagataattgctgggcactaccatacttcggcacgaagtaacgaattagtaccaataatcatttttttacatgtcagtatcatttcagagactaattattgcggaacgggctgacagacgtataaacatgtattgaccgcgtatccgacaaacctagccctcatgtcagtgacatgtgtcatatgtttttgtagaaacccccctggtcacagctgtcggtgacgctcgcccagcacccgcgccgctcctcctccccacgcggcgcaggcgccgccacgcggatctcggaccgcacggccccaaagcacgacaccttcggggacggaggctccgtgcccacggcctcgctcgcgaagacgctggcccctgcgcagcgacggccgacgacgggggagcgccgctgctgcacgaccatcttctcgacaggcagaacgcccaagacaattgcctctagcctcctcggcgccctcgacccgccattgttgcgcgtagcctcttccgccgcggtcttggggttggagctgccctcggtcgacccatcccgccccagacctggcacatgtcgctttcggtcggggcgagcagggaccacccgatggcgaatccattcgggtcggagagccccagcctcgcgtcggtggagctttcgtcggcgctcgttgtggcgccgttgggcgacgtgctccgtgaccgcgtgctggggtacgcggcgaggctcaaggacacacggcgaggttcgtcggagcacacactactagaaaaaggcttatccccaatatggctactagtggcgcatcatgcatgtggtgcgccattaataaccatattactaatggcgcacctcctgtctggtgcgccagtagtagttttggccaggccccatatccttaccagacttagcagtggcgcaccgtgggaaagtgcgccattactagttttaactagtaatggcgcaccatatccacggtgcgccactactaacaaattttttttttttcaaaactagtaatggcgcaccacacccaggtgcgccattagtaaccctggttaccaatgtcgcattcttgggaggtgcgccattggtaacgtgagaacgatactaccgccagggggagcggtagtaccgctatgacccagcggtactaccaccatcaccaaatgcaccccccggggaccgcgttttcagtttttttttaaaaaaagaaaatgatggaaatgtcaaaaaaatataagaaaataagttttccatgtgatatgtggtctagttgttgggaaatttacaaatatgaattttgactttatttgcaaaatctctctggaatttgtaaactgggcataacttttgcatacgaactcggattaaaaagttttttatatgaaaaatgatctactcgaaaagttacatccgaattcaaccggggaaaccccgttgaagatttttagaattcccaaaaacataacagaaaaaaagatacgagacttttaagatctagaggggggaaatggaaaaatttctaacttagtaatggtgcaccttttgctaggtgcgccactagtaacagaaaaaaaaattagcggtagtaccgctccccctggcggtagtaccgcctcctagctggcggtagtaatagaaaaaaaaattggtttcgaatttttaaaaaaaaaaatgttcaaaatatgatacgtaatatgaccgagaagtttgaaatattttttcaaaatttcatcacactcatagcatgaacaaagtcctagacatcaacaaggtttaataggattgatatgatagatatattaacaagtgcctattaagtgagctggtgttggggttggatagaactgagaagttaagcgtgctggggctggagtagtatttgaatgggtgacctttcggaaagtttgaccacggagtgcgatttgacttaagattaagcatagtgaccccagattaagaaaaaaagaaaaaaaattcgaaaaaacaaatttgaaaaggtgcgccattactatgtgacttagtaatggcgcaccaaatgtgcgttattactaacaattactaatggcgtggtaatagtggcgcacctaatagccaaaataggtgcgccattaatagacttttttctagtagtgacgtggcgaggtcacggacgctggggttgtagcagtaggagattacatataatgccaggggcctttctataaaaacatatgccacctgtcacctgccaggcgggccccgcttgtcggataaagcgtcaatacggtgtcattcaatggtttagaccttttcgcaacaattagtctctgaaatggtaccgtcatgtaaaaaaatgactattggtattaatttgttacttcgtgccgaagtgtggtactgtcctgcaattatctcttttttttcgttaagagctgctcacgcatcaaatttccaccgcataaaaaattcggtctcttttgaatttttttactatttgttttgatttttctgaccgggagcagatgagcccgggactgctcagatgtctaaataagctacaatttgaagcggacctcatacatcaaattatctatcatatttttttaaaaaaaatctactatttgttttgatttttttcgtcgatgcgggtgcatttaagctcggaagccaaatcgtcgattccacacatacacttcctcaccacactacagcattttgaggtgtaattattttatttataggttgggtccagtgtgggctagactctgtgacccgtttaattgggtattttcactgttctgacccgtatacgaaagtttagcacgatttgacccctgtttgaaacttttttcggatctgacccaaatcgagacgccaacatccgtggcgtcctgcttgtactgaagacgccatgaaccttggcgttttggcctggcccacctccgtggtcagacggcttgaccgtccgacgtggcaacaggcgaccccgaccctaaacgccaccatccatggcgtttacccccctgagagataagtggtcacggggagagtgtgtggggcccaccccacacactctccccaatccaactcttccagcccgagaaagataccccaaagaagagctcccccccctctctcccacctcaagctcactcaaattcggtttcaaatttgagtttcctccgtggatctttctctcccttgttggttgaggtaatctccccctagatccctaaattttgttggtaatttcttgttattttagtgccattatgtaaccctaggtggcacctttgtttctagattaattgaaatcctttggtattggatggcttttaattaacatgttgatgtggtagtagtaatgggatatgcatgttgtgggtacaaacttggatttgataaaaatgatggttaaggttaggttatgtgttaagcaaatgacatgatttatttagtacataagttttaatttgttattgatacaactcattaggaatatatagttcattagagttgcatattttgtgcaactatgcattataattgtcatttattcatcttgtttgttgtcctttttagatggatgatagacttgttaatgttcattatttggacaaagcgtcatttgttaccaaaactgcaagtgactatgaggaagtggtggtattcgacacaagtcctagttatgatgaggttgttgttaaagtaagagataagttgaattggatggaccccaatgataaagttgaattaataggaaggtatgatgttggggtgggaacaaaatctcgactgaagaatatgcctatcatctccgagttgcattgggggatatacaagggtaaagttgcggcttcggaagacatgtcacttgaattgtttgctacgaaggggcaaggtccgcggcctgatattgacttgaaccgcaaagtgtcctccccgtgtcatgctattagccctagtagaagtgtgactcttgttgtggatagtgccgaggtctatctctccaatacttctagccaaccgccacctagccaagaaaatgaagttgttgggcatgcttttgaaaaagttaatgaacaatatgttgacggtcatggtgatgatgatgatgatgacaggcacgaggatgagactcatggaaatgagcttcatgagaaggagaagagggaacgacggaagcgtgaggcggacatggcatgcaaaaacatgaagatggctcaagaggaggagagagttatgaagcttgaaagggctcgccttgcactagaggatggatgtagtgctgatgatgagcaagaggatgagattcatggcattgacatcggtgacttggaagcccaagggtagaatcagacagaaacgattgagaggcgacatggacagcctagctggatacactggcatgaaccaatttggtagcgggcactttatggagcctccggacactaccaactgtggtcaatgtgataattcgggacacaatgtgagaacatgctccaagaaaagaaaaacatcaaaggagggcaatcctagcacgagtcaggcaggggggtccggtggtcgtagaggttccggtggtcgcagaggtggttcccgtgctggtagaggccctagaggaggtgctaggagtggacaacgtggtagaggtggcgctaatggaggccctagagggggtagtaatggtggtcgtagaggtggttccggtggtggtagaagaggacggaggactgacaacgggtcggcgtttggttacttgcataatccaaatggttgacaaattatgaatggtaaatatttgttcattactttcttgtttttattgtatttagtttgttcattcaatttgttcatctaatttagtttgttcatgtaatttcctaacaattcttcttctcataggcatggcttcatccggttccacgatgaggccgcggtgcgctgaccaagaggacatgccgaacaagtgggtgtcggcaaggttggacaagacgaaggagaaagaagtgaaaaccccatcatgttggtgtggagatgagtgcaaagagaaggcagctcgtgaagaggagagggcaagaaagcttgcaagggctcgcgatgcacaagaggaggatgaggcacgcgacaagaaggggaaatggccgcgtgtgacccaatagagacttgcacgcttgaggcttgtatcacgaatggaccctttgtgctattcgaggatttggatatgaatttgtgattggaactatgtaatgaacctaagctatgctatttgtgatggaccctttgtgctattagcggcttgtatctacagttatattatgttgtgatgtgcaaaaaatatgtcatatccagagaggttcatatccaaaaaatatgaacctaattcaagacgccaggactcatggcgtctgcccctctgctcctccagcggcaactttctgtaaacctactgtaaacccaggacgccatgagtcacggcgtctggccctctgcaaaatttctgtaaacctactgtaaacccaggacgccacgagtcacggcgtctggccttctgcaaaatttctcttctaaagatacaacatacaaacatgaccaagccatggcctcccctttctcaaaaaagtgcaaacaaaatgaatcctagggttcaaacaagtatgaattaatgccacaaaaataaaagttttcaaccaaaaataattggaggaaacggtggagaatacctcaaggaagatgggggggctcagatccacacttttgatgaagaaaataagtgatttgggggtgatttgggtgaggggaggagagaagcagagcttctgtgcggcgccgccgcgaggaggaagaagactcgggcgtttggagtgggttgggctgcaccagagccggctctggcccgttatctgctcaccaggggtaaacgccatgggccatggcgtctacccctttgccacgtcggacggtcaacttagctgaccagagaagtgggccaggccaaaacgccaaggttcatggcgtcttcagtacaagcaggacgccacggatgttggcgtctcggtttgggtcagatccgaaaaaagtttcaaacaggggtcaaatcgtgctaaactttcgtatacgggtcagaacagtgaaaatgatccgtttaattcgagctgcagttgtgccgacagcaacgcgtgatgccacagttgcattgagcagtcgaaagtgaaaggcgtggacactgttggccggcgtgctctactttacatgactttgccagtgtgaatggctttacactggtaccgtgctcaactttaatccccagcgcatctgttctagtgtggagacgtgtctacgcccggtcggttggtggcggaactaaaagcatctatgatgtgctgctcacaacgtttatctcttccttacacggaagaaacaatcattgatctgaacccagctcatcttctccaacaaatacactgcgaggagaggcctcggtaggaacaacgcacacacacgaaaatccgagtctcctctcgagctcatttgctcctgttcagaaaaaaaatcaaaacaaatagtagaaaaattcaaaaaaattcatttttttgtgtggtagataattttatgcgtcaagtccgctctaaatttaaactcatttggacatctgaacagctcttgacaaaaaagataaatcgggtcaaaatagttcatgaacaactaaccttttttacagactccgatttgtgttttttttatgagagctgctcatgcatcaaattatctatcacacaaaaaaattggaattttttaaaattttctactatttgttttgattttattctaaccgggagcagatgagcccgggactgttcagatgtctaaataagttgaaatttagagcagacctcacacatcaaattatctaccacaaaaaaatagaattttttatttttttactatttatttttattttttttcgtcgatgcgggtgcagctgagctcgggagccaaatcgccgcttccacatagacaccagctttcttcctccccacactagctcattttgaggtgtaattattttgtttataggttgagtccagtggggctagacagcaacgcgtgatgccacggttgaaaagcatgggcactggtggcgtgctctactttacatgactttgccagtgtgaatggcttgaccctaaacaaatacactggctttacactggtaccgtgctcaactttgcaagtgtgaatggctttacactggtaccgtgctcaactttaatccccagctcatctgtgctagtggtggaggcgcgtctccgcccggtcggttggtggcggaactaaaagcatctgtgctgtgctgctcacaacgtttatctcttccttaacacggaagaaacaatcatttagctgcgttctctggaacaaatacacaccagcacacatacaccagctttctccctccccacactaccgcaattgcccaagttgagagagagagagagatccagctatggagattgccatgggggctatcggccctctcctccccaagctcggcgagctgctcatgggtgagctcaccatggagaagaaagtgagaaagggcatcgagtctctcgtgacagagctgaaattgatgcatgccgtcctcagcaaggtggccaaagtgccggcggaccagcttgacgagggtgtcaagatctgggcaggaaaagttaaggagttgtcctaccaaatggaggacatcgttgatgctttcatggtgcgcgtggaggatggcggcgagccagccaacccaaagaacagagttaagaagatagtcaagaaagtcaaaaagttattcaagaatggcaaggatctccatcggatctctgctgctctggaagaagtggttcttcaagctaagcagttgggcgagctgcgtcagaggtacgagcaagagacgcgggacactagttctaatactagtgttgaccctcgcatagtggccttgtatacagatgtgacagagcttgttggcattgaagaaacacgagacgaattgatcaacatgttgattgggggtgatgattggtcgaagcatccattgaagacggtctctattgttggatttggcgggttaggcaagacaactcttgccagggcagcgtatgacaagatcaaattgcaatttgattgtggtgcttttgtgtcagtatcgcaaaatcctaacatcaagaaaatcttgaagagtattctctttgaacttgacaaggtgaagtatgcagacatttataatgtagaaagggaggaaactcatctcattgatgagcttattgaattccttcatgaaaagaggtatgctttttttattgttctggcagtttgatagcttcttgtttagtaaaactataaaccaatccttatatataattgtgaatatgcatccaaatatgtaacaccatgcttttgattaattagatgtttgtagtaagtcttcctcgtgttactcacataaacctctagtaataattagagagtagtatgtttagggcgaccaataaattattgcttatatgtcgataatctcgatcattgaatcaataccctatgaaaactttatggttacactttccccaaaaaaaagtgcatctttagttttagaaatttgcaacagggaaattgcacatttctacacctacaattgcacacaaattttgtccaaattttggtctcacattatggaattttgtagccatagaaatatcatatccttagaattgtcaacttctataaaaaataaattatttgagttctcaactaattcaaaaaattcaatcatataggtacctcatcataattgatgacatatgggataaagaagtgtggaaattaatcaagtgtgccttctccaagaagagtcccggaagccgattaatcacgacaactcgtgtcgttagtgtctcagaagcatgttgcccatctagggatgatatttacaaaatgaaacctctttccaatgatgtatcaagaaggctcttctataaacgagttttttctgatgacaaagtgtgtccccaagaattggtgcaagtaaccgaagacattttgaagaaatgtgggggcataccattagctattattactatagcaagtcttttggctagtaacgatcaaataaaaacaaaagatcaatggtatgctttgctcaattccattggtcgtggactcacacaagatccaagcgtggaagagatgaagaagatattattattcagctactatgatctaccttcttatctgaaaccatgcttattatacttaagcatcttcccagaagaccatgagataaggagaaatagactgatatggagatggatatcagaaggcattgtttatagtgaaaagaaagatattagcttatatgagctcggtgacagctacttcaatgagctagtaaatagaagtttgatccagcccatagccattggtaaggatgaaaagataaatgcttgccgtgtacatgacatggtgcttgacctcatatgctcattatcaagtgaagagaactttgtcacaatattagatgacaccagaagaaaaatgcctaactcagagatcaaggttcgcagattgtccattcaaaatagcaagatagatgtgggtaccactaggatggagcatgtgagatctgttacagttttctcagataatgctgttggagaagtgttggatatttcaagatttcaagttctgcgcgtgttggatttagaaggttgtaaaaatgtctcggatgttgggtatgtggggaatctgttgcatttgaggtacttggggctaagatatactcatgttaaggaccttcccatgaaaatagggaagctgcagtttttgcttaccctggacttaggaggtactgagatagaagtactgccgtcgagtgttgttcagctaagacgtctaatgtgcctgtatgttgattatgatatgaagctgccatctggaataggcaacctgacttccctagaagtgctagataagctggggttatctgacgcggaccttgattttgtgaaagaattgggccatctgaccaagctcagggtgctccggcttcactgtgatggttgtgatgagagcctgggtaaagctttggaggaatccattggtaatatggacaaactgaacagcctagatgtatatgtccgtcgtggactcattaatttcctgagcgaagattgggtgcctcctccacaactccgcagattggctttccactcaagtcaaagttggttcgagacattgccgtcatggattaatccttcatcgcttcctctcctctcctatctgaagatatcggtgtttgaagtgcgatcggaggccatccagcttcttgggactctgcctgctcttgtttatctccagataacgaattattctgtgtaccggaatgcacatgaggtggaagctatcctgcctgtcctttcctctggtgcgttattcccatgtgcgacagagtgccgcttcaggggtattggtgccgtgccgtctacgtttccacaaggagctgcgccaaggcttaaacatcttcggttcaccttcccagccaagtggatctcccgtgaaagctttgatttgggcatgcggcacctcccttccctggagcgtgtccttgtgcaagtttataagaaggaagctagcgatgcagaggtggatgaagcggaggctaagctgagggccgcagcggatgaccatcccaaccgccccaccctgcgcatcacgaggctaagctgaggtccgcaattccgtgctacgtacatttgttctggtccctttgtgttttcaacaaggtttagtcctcatcttccttcttccttctcctttttcccttttcaggtagaggaggaattgatttaccaggtgctgcacgcaggtactacttactccatcaattaattactactagcgcccaactattatttcatcattcctttagcctgcgtagttcaatcaggtttctaaagcgtacgtagcgttgccgcgtatttaaagcgttaagaatattgcaatgtgaattcggctttggttcaatcaggtttcagcacaagtcttgttatttatgcatgatgcaaaattacatgtagcatgataaaaatgaaccgacaacccaacagtcatatagatacatgtgccttttttctgtacttggatgacctctgctttctttctttctgaaacattgcactgaagcatttctatgcgtgtctcttccaaatggcatggcaggtagcatcgtactcctaggatctagcagatgcccttgacatggattcgatcgtcggcgcctccaacaactcctcctgtactctgctgtttgacctgtctccactctgcatccaaatgaacctcctcattttgtctgcttatgtttggattctcttcacgcttccaacaactcaagaaccattatgtttgagggcgccttccccatgtgtttcgccctcgatgaaccattatttatgacgcactgcctggctggtttgcttgctctcattccgcattgcactgctttgtttgaagcagctcaatgttttgtgccagattcgtaaactatgatgtccggttcagtttgccgtattgctttgatgatgaaataaccaggcctgtattaagtacatctttgtattgatttacaactggaatttgaatatctcttgtatactaccgtatgccttcgctgtcatctagtaatctgtgagattattggccctgaactgatgcagtgttttctggatgaaaaaatgattcggtgtcccttcaatgactaccttaattatacatggagcaaatcataagatgtttcttgcttgcgatgatgcaaatcatgcgatgtaatgcacatgaagacccgcttattatcaactcaataagttcatgtacgggtatcatgacagtatcttgttactcttgtcgccgtcgagctacaagtgttcgttttttagccagctccggccgagaatgcagccgagatccgatgaggttttttcgacagaaatctaaaccgaagctgaaatcctgaaacccagttcaacaccaaaactgaggcagtattctttttgtctacagctttttgtagattgtcatgttctgagctactaattcctggcgctgtcgaaacgctgcgagttactgggatgaagggagtagttacttttgtccgctcctgagttaaaaagatagtaaaaaactacctgttagaaattcagatttagcaccacattcactttccctgtgaaccgatcaattgtttctgtccggtcgatcagatgccttgtgtttcacccggaatgtgacggatggattcagaattcaggaggatgtacagctacgtcgtacggtgctttcttccgtctatttgagagtcgagttttgtcagtattcagttcaatcttctgaattttcatgctatatctttctcactggttttccttgcattttgtcgagcttacaatctccatcatctttctctttgtgtagagctggaaattgctttaactaagataaggcgagaggacaatgtcatccatttttctgttattttagacatatttatcagcaaataatacgacagcatcagcaaataatgtgacagcatatagttacccctgagacctcaacttggtcttagagcatctccaacttagaaaaaaactgcgcgcgaaaaaacatcaaggtgcgcttcagcagccgggtgaaaaaaattataccgcgcgcggggaaaagtggcacagcgcggcggagttttgacgcgcaaggccgagcacgttttataaaagctgcgggcctccgcgttcgccaaccgccagaactccctctagccgcgcccttcccctgttggttctcgtgtggccccgctgccgccaccgcgcccgcggatcagctcgggctaccgcgacgtcttcctccgccccttcgacgtgtattacgcgaagatccgctccggcgatacacgccttgggttcggaaccttcaaaaccgcccacgtggccctcgggcgaccttggtcacagatgaacttccccgtagtgtggacgcgccagtagatgtaggatctcgcgcctcccccgcatctaatcatcgatgaggatcgccacctccagcagaagcgggagcaccgcctcctcattgccgaggcgaacgagaatgccatggcggcatggcgcgagcgcttcccgcatgttgttgctgccgagaacgagttctggacgcagaggagtacggagcgagccacgcatcgggtggacaagcgtgtgcagaaggaacccgacgtcgacgtgggacgatgaagatcctcggtggctcgacgtgtttacgtcatcggactacaccatcgaagaggacgaggagtagtctagtattgttttatctatttttatttagcatggtatgaacttgcttttggttttgttatgaatttgaatatttccgttgcgttgtttatattttttccaggcgacggctgagcgcgtgctggattttgccatacctgatgaaacgctacagctgcgccctaaattttatagcgactgaaaaagcaacgacatcaccgtgggcgctaaatcgctatttcgacgctgtaactttttttacggtgttgagctaccgcgtgctgttaaagatgctgtttatgtttttgcgtcagttacaataactggatgacacatgggaccatgtcgtgtggaggaccacagggcagcgtctctctacgtgcacgtgacagcctctactcccaacgattatttctgccgcgtttgcagatgggcagagtcagacttactttcgtttgcagtgcagccgagatccgaagaggttgtttcgaggaaatcgaacccaagcggaatcctgaaaccgtgttgaacaccaaatctcagttgttattctacattgtcacgtgttctggggtactaaaacctcgctctgtggaaacactgcaaactagttacttttttccgcacctgagttaaaagttaaaacccactagtctgaaattcagatttagcgccacattcatcttccctgtgagcgtatccagaatgccatcacgctgagaagaattgtttctgtccgctcggtcatatgcatgctgtgtgcgattgtgagtgccttgtgttgcccccggaatgtgatggatggattgagaattcaagaggacgtacgcgttgcttcctccaaacaggcattcgcccccttttatagataaaggcacaaaccgcataaagtacacagctgaacgatacatgatggtgagatgaccctcttataaagcagatcctaggctagccggatcacgaagcagaacaacaacactatcgaagaagaatacaggaaaaatggagcacaatcacgaaacatcctaggatcctagttttaaaaatcggaccggaccgacggttggaccggaaaaaaccagaaccggcggccacatcgggtttttaagctaacaagaccattccgcaatcagaccgaaaaaaaccggtcgaaccggccgattttctagaaaaccggcgaaaacccgggttattaaaccgggaaaaaccaagaaaataattaaaaaaaattgagagaagtgggattcgaaccgtccacgaccctataaccgactcgactatactagtttgttgtccaaaacatgaaaataattatttttaaccattgtttcacactatattagcacatatattactcaacatttattattattttgcttaaaaaaccgacaatggaaccggtgaaccggcggtccgaccggtaaaacctgaaccgacaaccttttcggttcgattttcggttcagttttttaaactatgcctaggacccctaagctcctagacaacgcccccaagagggagaacggcgcagagcgtcgtcgctgcctagccccaccgggaagggtcttcatctggaaccctgacacggagaggagatccacagcgacatcttcaagaagagaacggcgcccgcaagcgtcaccgtcgccggtgcaaaagcgcggagctttcgcacggcaccccatccaaaatcaccgaggccctagggcaaacgtggcatgtccataccccagatccagatctgggcgacgtccagcagaggacgcgcccgagtcaccaactgctacccctctcgtcgcccgcacgaaccaagaaggaagccaccaccaccgacatgacgcccgccggagagccaaccatgcgacccaccctccagagccgccgctccggcatccaagtccaggacctcacccactgcccacaccacagagtatcagccatggtaggaagagcaaaagtccacatctttcactcctagcccggcatgagccacggaggttggtccggcgccaccacagtaggggcccagccctgtgtacccagccaatcccggtggactaggggagacacacctccgtgattctcgacggccgtcgccgagtacactcagacaacgccatatccgtgggcctcgactccgtgttgcccgacagtaccgtgaagtcccgaccaccaccaacgaccaccgtaccaacggagggagggacctcgccgaccgcgggtacatcccggatcgagcctaatcacacctacccggagtagcaactccgacacgcctcgggccccgatcagatcctcctgagcacgcacccccggtcataaacattctagatcgaggagaaggaggatcacatccgccacgttgcgccgtcgatggtggcacggccatcacagagccacggacccgctccacctgcaccccggtcaagccggtcaccacggccataccgccggaccatcccgacagggcacaccaccacgccgcaccactaccggcacccgaagccaccggcgacggccggcccgcgccaccacagcgcgcatcgcccaggagacagcggacggaggagcccccgatgcagatccggcaaggtccagagccgccgccccaagaacgccccgtcacctcgggacctcgagcagcggccagcaacaaccgccaccaccgccgtccaatacccacagcggccgccgaccacgcgccgcccacggctcccagcgccagatctggcgcaggcagccgctagcacgcccctccatcgagcagcccgacgcgccacgaagccacctgccgccgtcgacggcagagacccgccgcgccgccgcgacccaccaaccgcggcgcccgggcccatggacgcggcccacaccggcgccacaggcgaggggacgaggaggcccaccggcgccagcgccggccaggctttgcctggacgcactctgcggcggcacgcgggggaggaagggggcgggaggaggggaagaggccggcagcggctagggtttcctccccgtcgcctgcgggagcgacgcgggaggtgagggagttatttcaatctttctgttcccgtacgctgcttccttccgtctgtttgaggagctatcgagtttcatcagcattcagttttgaattttcgtcaccttctgtttgtatttctttctcactgggtttccttgcattttgtccagcttacaatcactatcacccctgagacctcaacttggtcttagagcatctccaacttaaaaaaaaaactgtgcgcgaaaaaacatcaaggtgcgctccagcagccgggtgaaaaaaattatcctgcgcgcaggggaaaagtggcacagcgtggcggagttttgacgcgcaacgccgagcacgttttataaaagctgcgggcctccgtgttcgccaacctccagaactccctctagccgcgccctccccctgttggttctcgtgtggccccgccgccgccgccgccgcccacgaataagctcgggctaccacgacatcttcctcctccccttcggcgtgtattacgcgaagatctgctccggcgatacacgccttgggttcggaaccttccaaactgcccacgtggccgcccacacgtatgacgtggcggcattagcgcctcggacggcctcggtcgcagatgaacttccccgtagtgtggaagttgctttgtaactaagataaggcgagagtgttagcaaataagccacggcgagcatatgccagtgcgtgtacgtgcgtgcgctgggcatgtcgggcgctggttcgagccgcgccgggtccgtgaccatgcgtgtgtgtggcaagtggcattgtatgggcaatgtctgactcgtgtctgaccattgtgtgggcattatccgagtagtgtatgggtgatgtatggccagtgtacgtagtgtgcgtgagtgcgtccactagtccggtcggttttgagcgaaagcagggatagctgagtcgttggccgttggcgagcgcaatggaggaccatggcatgaaggccgggtctcgtggaagagcaggcggctcacgtttgagaaaggccaagtctccaggagattgtgtacatgtgtgtggagctcgacgaagggcattgcgtgggcactgggtcgttgacaggctataagaactcttgtaatccttctgtgtacggctgggccattcagttggataatgaaaaacgacgtctctgcgccggggcgttcgagcgcccgaaaatccactgttgtctcctttttcttctaccttcatttgtaagagaaagagagagagacagagcgagagggagctgggttccgatgcaaagagcaaactagggctcggcgccaacagagaggacgatgtttagacctgtttatagttatccttgagacctcaacttggtcttagttgttcattattttgcgtaagttaaagcatctacacccgaaacatgcaaatctgctccctcaaacgaccgggtgtgtccgcggacggtgatcggtcacgcctcaaaaaatgactactgcatccggacatcttatatttgatacctcaaaacatgaagcatattaaacctaatagtacgagctatctactcttcgtcggagatatcgacgaattccgtgtcctccgatggatagatgtgcagcagatcagcctggacaccggctggcggtggtccggaccgaaccggaccgagctctccaacgggctgttttttcaggaccggaccgaatttgagctggctcggtcaagctcttttagaccgtgtggatcgattccacaactggttccagctgccgtttaggtcctactgcagtttaagtcctagttagctgttggttaggaatctgttgattttggagagcaaataaagtagaaatgcaacattttctttgacaaacgacaacatttggacaacaagcactggactaaatttgaacagcaaaaatgactaaatatcacatctacaaacaattcatttgcacaacaagcacttgactaaatttggagatcaataataactaaatttggacagcatttcatttgatttttgacatcaaaacagctgattttgatagcaaacatagcacaaatcaggttcatagcccaatatcacatcgacaaacataaggttttttcatcattgaacgatacgattacaaacttgcgatgataatttagagttcatgtcaatttagaagttcaacgtaacacaaatgagaggttcatctccaaagttgcaataacaattcatacttcatgagtcggcaagttcgaacataacacaaattcaaaagtagccttcacatgagaaatatcactttctcatccatctcctaaatagcaagatcaagagccccatgatgaatgtctacaagtaagataagcaacattcacataaataatgtttggtattgtataacatgtgaaacatgtaggaagaatagttaccaatcgttgatatcctccacaacgggtaacttgatggtcttaacatcatcctcttcattctcatccctcggctccaagtgcggaagacaaatgatcacatcacatacaacaagaccagaattgaaggaaaataaggtaaggaagatattgcaaacataccatcatattcaagtcgacatgcgtgatacgtctccaacgtatctataatttttgagtgtttcatgctattatagtataactttggatgtctcatatgcatttatatgctattttatatctttttttgtgactaatctatgttggaaatatgccctagaggcaacaataaattagttattattatatttccttgttcatgataatcgtttaatatccatgctataattgtattgattggaaactcaaatacatgtgtgggtacatagacaaaacactatccctagtgagcctctagttgactagctcgttgatcaaagatggttaaggtttcctgaccatggacaaggtgttgtcacttgataacgggatcacatcattaggggaatgatgtgatgggcaagaccaaactatgaacgtagcatatgatcgtgtaagtttactgctacagttttatgcatgtcaatgtatctattcctatgaccatgagatcatgtaactccctgacatcggaggaataatttgtgtgtatcaaaacatcgcaacgtaactgggtgactataaaggtgcactacgggtatctccaaagatgtctgtggtgttggcatggatcaagactgggatttgtcactccgtgttacggagaggtatctcggggcccactcggtaatgcaacatcacaaacaagccttgcaagcaatgtggctaaagagttagacacgggatcttgtattacagaacgagtaaagagacttgccggtaacgagattgaaataaggtattggataccgacgatcgaatctcgggcaagtaacatacggaaggacaaagggaatgttatacgggattatatgaatccttgacatagtggttcaaccgataagattatcgtagaatatgtaggatccaatatggacatccaggtcccgctattagatattgactgagaggtgtctcaggtcatgtctacatagttctcgaacccgcaaggtctgcacacttaaggttcggtgacattttggtatagttgagttataggtgctggttaccgaagtttttttcggagtcccggatgagatccaggatgtcacgaggagttccggaaacgaaaattgatataaaggatgacttcatttggttaccgaaaggttttcgggcattgccggtaatgtaccggaatgacgaatgggtttcgtatcttcaccgggaggggggaccacccacccgggagggcccaaggagcctaggggctggcgcaccacgtggtggggtcagccaagtggcctccttgcgcaagagaagagaaaaaaccaaaagaagaagaaaagaaaaaaaagaggaggttggacaagagaggaggactcctccccccccccccaaaacgaattggaggactcctcctccctcccttcggccgacgcccttggggctctcttgagcctcaaggcaagcccctcccctccccctttatatactggaggttttggtgttttgagacacaattatttgccacgtgcaatagacacctctactccgtttctcctctagatcgtgtttctgcggagcttaggcgaagccctgcaggaatagcatcaccaccatcgacggagcgccgttaggctgccggcgaactcatctccctcccgcccctctttctggatcaagaaggcggagatcgtcatcgagctgcacgtgtgctgaacgtggaggtgtcgtccgttcggcgctagatcgggacggatcacaaggcggttcgtgggacggatcgcggggctgttcgtgggatggagatttggatctcacaagcgtaccactacatcatccgtatttattaacgcttctcgcttagcgatctacaagggtatgtagatctaatctccctctcgtagatgatcatcaccatgataggtcttcgtgagcgtaggaaattttttgtttcccatgctacgttccccaacagtggcatcatgagctaggtgcatgcgtagatgattttcttgagtagatcacaaaggggtttgtgagcgttgatgtttaagttgctatcctccttagtcttttctcgattcagcggcattgttgaatcgaagtggcccagaccgacattactcgtaaccacgagagactggtttcaccgttaacatgcaatgagattgcatcaaggtgactggtgggtgcctgtttcttcaactttagttgaatcggattagaacgaggtggaccttggagaaggtgaaatagctacttactcatcaccgttgtggtttttgcgtaagtaagatgcgatcatactagatacccatagcagccacgtaaaacaagcaacaacaaattagaggacgtctaatttgtttttgcagggtatgcttatgatgtgatatggccaacaacatgatgtgatatattggatgtatgagatgtgtcatgttgtaatagttaatatcgacttgcacgtcgatgctacggcaaccggcaggagccatatggttgtctttaaactaacgtttgtgcttgcagatgcgtttactatattgctaggttgtagcattagtagtaaaagcatagatagcacgacaaccacgatggcgacacaatgatggagatcatgatgatggagatcatggtgtggcgccggtgacgatggagatcatgccggtgcttcagtgatggagatcgtgaagcacggagttcatggccatatcatgtcacttatgatttgcatgtgatgttaatccttttatgcaccttgttttgcttagtaacggcggtagcattatgaggtgatctctcataaaaatttcaagataaaattgtgttctccccgactgtgcaccgttgctacagttcgtcgtttcgagacaccacgtgatgatcgggtgtgatagactctacgttcacatacaacgggtgcaaaacaattgcacacacggaacacttgggttaaacttgacgagcctagcatgtacagacatggcctcggaacacaggagaccgaaaggtcgagcatgaatcatatagttgatatgatcaatatggagatgttcaccattgtagctaaactcaactcacgtgatgatcggacttgagctagtgaatttggatcatgcaccactcaaatgactagagagatgtattttttgagtgggagttattagtaatacgattttctaaactcaaatttttcatgaacatagtcaaaaggtcttcacaaattatgtcgtagcatacgttgtagctctactgttttagatatgttcctagagaaaatttagttgaaaggtgatagtagcaattatgcggaattggtccatgaactgaggattgtcctcgttgctgcatagaaggcttatgtccttaatgcaccgctcagtgtgctaaaccccgaacgtcgtctgtagatgttgcgaacatccaacatacacgattttgatgactacatgatagttcagtgcgtaatgcttaaacggcttagaagtaaggcgcggaagacgttatgaacgtcgcgagacatgtaagatgtttcaagagatgaaattaagatttcatgcttgtgcccgtgttgatggatacaaaaccttcgacatgattctttgcatacaaattaagggagaaaagctcaatcgttgagcatgtgcttagattgtctgagtgctaagattgcttgaatcgagtgggagttaatcttccagatgagatagtgatggttctccaaagtcactgtcaccaagctgctagagcttcgtgatgaactataatatatcaaggatagatatgatgatccttgagcaattcacgatgtttgacatcgtgaaagtagagatcaaattgaagcatcaagtgtttgatggttagtagaaccactggtttcgaaaagggcaagggcaagaagggatacttcatgaaacggcaaaccagttgttgctctagtgaagaaacccatgggtgaacccaaacccgagactaagtgcttatgttatgaagggaacggtcactgaagcggaactaccctagttacttggtagatgagaaggctggtaaagtcaaaaaaaaggtatattagatatacatgatttttatgtgtactttactagtactcctagtagcaccggggtattagatactggtttaggttgctaagtgttagtaactcgaaataaaagctgtggaataaacggatactagctaaagttgaggtgacgatgtcaggaccccgatcctaagccactagattctatcttgtaacacactgcatctctttgcggtctcacgcacggttatccccacggctgccaccttaccttggccgggaccgtttgcgtcttttgactcacgtatgcattagtgttgctagcaatccagtgtcaaagaacctggatcgacatgactagtcataaacccaagtggcagcatcgtacagagacaggcatacatgacccaacaaagcaggtgtccgtcatcaacgagtgtagacgagtagtagcaatgctaccaggactccattacaccgcgaaacatttccccgtagggacagacacagcagctgagaaggacacatgccgctcaacctaagtgttcggagcagtagcaagctaccatggctcacaaaacacgaaggggcatttccctgtaaggagtgctactaaaggtacacgactaggtggtcgaatcccatacatatcaatacatcacacgtacgcatgacgtatcgatatgcatagatacaacgatggcatcacaacataaccataaacatacaaactttatttaaaggctcggaagagcctcacacataatattacacagataggggtctcacgacccatcataacagtcattcaaagttacaagccagcggaagtatttaaactgtctgagtacagacagatgaagctagaaggcacatggcctgactatactacaggcccaacctagggccagatcgtagctgggacaccagctactcgtcgtcgtcgatgtctaggtagaacccaccgttagggtcaacaacatcctctgcaacaattattaagcaaacgtgagtacgaaagtactcagcaagactttagagataactatctactcatgcatatgtttcaacaagggttgtggggtttcacgcagaaagccagctttgactcttggctagcctatctatgactgaaagcatttttaaacaacttgttttctcgtacacgagtccatttaactccacaacaatacaacatcatggaatcatttccgtctccctatggaaatgccgtccatgacactcacacttatgttgacaattttatgagtagccattgaagttatctatgaacaacatatgtttccaagtagtccatatccgcggacgcggctattcgaatagatcataatcctgcaggaggtacttcttcacacacgctctcgccacttatcgctatgtgctcatcatgcacctcggcaaccttcaagcggaagcccagcgagggagtcggtcacgaccgttaaccacactaacacctagtccaggtttatcgcctatttgagagtgatcccgcacggaagtccggccgaggtttctgccacggcctcaaacgatgtgcgcagggttcccaagcccaccatccgggtgccacttggtacaccgtgccactgcctaccgcatcatagcccacctctaaggtcagcgctacgcacggcctccagcatgtactataaacaccagaaactacttgcaactcctggatcgagtaatagctgattaataagtcgagagggtcaattaagtatcccaacgtgtggtagtatcttgtcttggatcacatacacggaactcagttcctaaggacggttccaatgaaacaacccgctatgtactcctacatagcctttcatcgatacctttaccaaatcagattcaatacacgaactttatcaatcgccacattctcacgatcctgttcatcacccagatgatagaccatacacaactctaagcatagcatgcatagcaggataaagcacatcatagctcaagcatctaccaggtatgctaggtcgcatggtttagctatttactgtgacaagaacagatcatgcaaaggaatgggttcaactagcacggtaaaagtatttgaaaacatttgtcctaatgcaatgaataaggcaggagtgagaacatagggttttatcagagtgatcaaggttgttgcttgccttgttgctcggcagagggataatatccgtcggtcgaatattcgatggaatccggaggagcggagcctaccgatagaaataacatcaatcaataacaatcatatgcaacaagatgatgcatgagcatggcatgaagatgaaaggtggtaggctaatgtagctaccatttattgagttgaagttgatttgaatcaagattcaaatatcacttcaaacaaggtattttcgaatacccttttaattgattcgacctgatgctcaggtcaacttgttttaacatgcatgagaatgatatgttgagttgctggttgtgattgagcaatgtttggtcatagcatttgaagtggaattcaaatgaattttcaaattccaactccaaagcatttatcaaatttaacctattcatcattttacctgtttggtgaagttaacattttcaaacatgtttgaaaatgtcatattcagattccttggatttttctgatcatttttcatatattatttgtccaatttggagttatattcaaacttttatgaatttccaaagttttgaacttattctggaattatttttaaacagaaaaagctttattgcatcagcatgacatcagcaggtccaactggccgttgaaagtcaaacctgaccagtgggacccactggtcagtgactcaggccggtttttagtttaaatttaagttaattagttaattagcagggtaggacccacctgtcagtgactgattaagttaatttaattaagttaattttattttcactaatactaattatccagaggctagccccacctgtcataggctcaggggggcagatccaccggcggcgaggtcgttctcgccggtggtgagcctccggcgacctccagaacggcggagaggctcggaaacgtggcacaggcagccaaactccgcgcggagtgcaccagaagaacgacacgtctcccgcggatccatttttgcacttagccgaggacgaactggccggagatggcaccggcgaggagcctggcggcggccgaagctcgggcatcgtcgggctagtcgaaacggagggagttacgcacggggatgagctcctacaacacctactcgacgccctgaagccactgatgccctcagatggacgagccgttcaccggagggctaccggcgacgaggtcccgcggcggatctcgtcgggcttcggtgaaatcggggctagaggaagatattgaagggggaaacttaggggaaatcttcctaggctcacggggagtgcagtggtagcgaaagcttgctcggggacggcctgaggagggagaacgccggcggcgaacttcggtgacccgaggaagaagacgatggtgcctcggcgtttcactgcatcttagcgacgggctcgtggcttgggagcttcagggtgctgaggcggtcctattgcacgactcagaaggggaggaggttggctggaatgacggcgagctcgagctcgggctcggctctaatggtggcagagaggggagacgaggcagggggcgaatgaggagggggagagctcgggcacgtttgcggggagcttatccccttcgctccagcgcatcaggcgaggcaagtaggcgggcagctgcgtgggagcgccgggcgacgcggcggtcacctcctgctccgactggcaggggaggaagaagacaaggaaggagctgggctgggccaggtgagcgacaggtaaggtttttcacattttttatgttttgttttctgttttgtcaactaaattgatgtgctatttattttgattccaaaattagttcaaaaattattttgaatatactggaatattagttggaatatatccaactattcctgaagttttcaatatttttgaaaacttgaagtttttgaattcaaatttaaacttgaattcagtggctttttgaatttaaataaaatgccaattgtgttttgaaaacagttttctcccctgatcatttgctttctagaattatccgaaaaattgaacttttcttgaggccattttgggttcattgattttaacaagtttttgaatttccttgaattagaaagtggctagggtttttgaagtttggtttcaccacttgctttggatttgtttcaagttcttgaatgcaatgaatgaaaatatgagcacaaatgataaaccctagttagggatccagggatgtgacagacgatgtgttggaagtgtttccaaggttgatatgatcgacatcgcacgctccctctaccatcgggattagtgttgaacctaagtgttatttggtgtttgcgttgagcatgaatatgattggatcatgtttatttcaatacggttgttcgcttaagtcagagaataaaaggttattctgtttggataaataataccttcaatggtcatgcaccaatgtgagtggttcattgaatctcgatcgtagtaatacacatgttcataatattgatgccaaaggatacaaagtagtgatgatagtaccacttacttgtggcactgacatttgagtcatattggtgtaaaaacgcataacgaagttccatactgatggatcttgagactcactcgtttttgaaacgtttgaggaatgcaaaccatgcctattggtgtaactgcatgaaggaactccatacagatggattgttcggattcacttgactttgaatcacgtgagacatgcaaatcatgccacataggtaagatgactgaaggcctcattttcattgagatgaaaaagagatagtgacttgttggaagtaatacaatttgatgtatgcagtccaatgagtgcttaggcacgcagtggatatcattatgttcttacttcactgatgatttgagtagatactaatatatttgcttgatgaaacacaagtctgaattattgaaaggttcaagtaattttcagagtgaagttgaagatcgtcgtgacaaggggatgaaatgtctacgatatgatcgtagagatgattgtctgagttgcgagtttggttcataatttaagacaatgtgaaaattgtttcacaactaatcccacctggaacacaatagtgcgatggtgtgtccgaacgtcgtagccgtgcactattggatatggtgcatactgtgatggttcttatcgaattaccactgtaatgttttgggattatgcattagagacaaccgcattcactttaaataagggcaccacgtatttccgttgagatgacaccgtataaactgtggtttggagaaacctgagctatcgtttcttaaaagtttggggctgcgacgcttatgtgaaaaagtttcagtctgataagctcgaacccaaagtggataaatgcatcttcatagaatacccaaaacagttgggtatacctcctatctcagatctggaagcaaagtgtttgtttctagaaacaggtcctttcctgagaaagagtttctcttgaaagaattgagtgggaggatgttgtaaacttgatgaggttgtcgcttcaaccagtgtgtagcagggcgtaggaagttgttcctgtggcgcctacactaattgaagtgggagctgatgatagtgatcatgaagctttagatcaagttactacaaacctagtaggtcgataaggtcacgtactgctccagagtggtacagtaaccctgtcttggaggtcatgttgtttgacaacaaatgaacctacgagctttttgacaacaaatgaacctacgagctttagaaatagtatagaatttttgtaaagcatataggcttgtttgaaaggagttttttgaaaggaaacctggattaagctattagaacatttagcatcaagatctacagagatagatcaagacgcttgatgaaactttcaatgaaatacatgccttgacaagtttttgaaagagttcaaaatagatcagcaaagaaggagttcttagctgtgttgtaaggtgtgcatttgagtaagactcaaagcccgaccacggcagaagaaagataaaggacgaaggtcgtcccctatgcttaagccgtaggctctacagtatgctatgttgtgtaccgcacctgatgtgtgccttgccatgaatctgtcaaggggtacaaaagtgatccacgataggattactggacagtggtcaaaagttatccttagtaaatagtggactaaggaatttttctcgattatggaggtgataaaagagttcgtcgtaaagggttacgtcgatgcaagctttgacactaatccggataactttgagtagtaaaccaaattcgtatagtggagtagtcaattggaatagttccaaatggcgcatagtagcagtgtctgtaggataacatagagatttgtaaagcacacacggatctgaagagttcagaattgttgactaaaacctctctcacaagcaagacgtgatcgaaccccagaactgtatgggcggtagattcgttgaaatcacatagtgatgtgaactagattattgactctagtgcaagtgggagactgttggaaatatgccctagaggcaataataaattagctattattatatttccttgttcatgataatcgtttattatccatgctataattgtattgattggaaactcaaatacatgtgtgggtacatagacaaaacactatccctagtgagcctctaggtgactagctcgttgatcaaagatggttaaggtttcctgaccatggacaaggtgttgtcacttgataacgggatcacatcattaggggaatgatgtgatggacaagaccaaactatgaacgtagcatatgatcgtgtaagtttactgctacagttttatgcatgtcaatgtatctattcctatgaccatgagatcatgtaactccctgacatcggaggaatactttgtgtgtatcaaaacgttgcaatgtaactgggtgactataaaggtgcactacgggtatctccgaagatgtctgtggtgttggcatggatcaagactgggatttgtcacttcgtgttacggagaggtatctcggggcccactcgataatgcaacatcacaaacaagccttgcaagcaatgtggctaaagagttagacacgggatcttgtattacggaatgagtaaagagacttgccggtaacgagattgaaataaggtattggataccgacgatcgaatctcgggcaagtaacataccgaaggactaagggaatgttatacgagattatatgaatccttggcatagtggttcaaccgataagattatcgtagaatatgtatgatccaatatggacatccaggtcccgctattggatattgactgagaggtgtctcaggtcatgtctacatagttctcaaacccgcaaggtctgcaaacttaaggttcggtgacgttttggtatagttgagttataggtgctggttaccgaagttttgttcggagtcctggatgagatccaggacgtcacgaggagttccgaaatggtctggaaacgaaaattgatataaaggatggcttcatttggttaccggcaggttttcgggcattgccggtaatataccggaatgacgaatgggtttcgtatcttcaccgggaggggggaccacccacccgggagggcccaaggagcctaggggccggcgcaccacatggtggggtcatccaagtggcctccttgcgcaagagaagagaaaaaaccaaaagaagaagaaaaaaagagaaggtgggacaagagaggaggactcctcccccccaaaccgaattggaggaggactcctcctccctcccttcggccgacgcccttggggctctcttgatcctcaaggcaagtccctcccctcccccgttatatactggaggttttggtgttttgagacacaattatttgccacgtgcaatagacacctgtactccatttctcctctagatcgtgtttctgcggagcttaggcgaagccctgcaggaatagcatcaccaccaccgtcggagtgccgctaggctgccggcgaacttattccctccccgtccctcttgctggatcaagaaggcggagatcgtcatcgagctgcacgtgtgctgaacgcggaggtgccatccgttcggcactagatcgggacggatcgcaaggcggttcgtgggacggatcgcggggctattcgtgggatggagatttggatctcacaagcgtaccactacatcatccgcatttattaacgcttcctgcttagcgatctacaagggtatgtagatctaatctccctctcgtagatgatcatcaccatgataggtcttcgtgagcgtaggaaattttttgtttcccatgctacgtgttggaaatatgccctagaggcaataataaaatggttattatcatatttccttgttcatgataatcgtctattgttcatgctataattgtattaacaggaaacagtaatacatgtgtgaataaatagatcacaatgtgtccctagcaagcctctagtaggctagctcgttaatcaatagatgatcatggtttcctgatcatggacattggatgtcattgataacgggatcacatcattaagagaatgatgtgatggacaagacccaatcctgagcatagcggtagatcgtgttgttcgtacgctaaagcttctataatgtcaatgtgtcttttccttcgaccgtgagattgtgcaactcccggataccgtaggagtgctttggggtgtatcaaacgtcacaacgtaactgggtgactataaaggtgcactacgggtacctccgaaagtatctgttgggttggcacgaatcgagatcgggatttgtcacttcgtgtgacggagaggtatcgctgggcccactcggtagaacgtcatcacaatgagctcaatgtgactaaggagttagtcacgggatgatgtactacggaacaagtaaagagacttgcaggtaacgagattgaacaaggtatggagataccgacgatctaatctcgggcaagttctataccgataggcaaagggaatcgtatacgggattaattgaatccttgacatcgtggttcatccgataagatcatcgtgcagcaagtgggagccaccatgggtatccagaccccgctgatggttattggccggagagatgtctcggtcatgtctgcctgtctcccgaacccgtagggtctacacacttaaggttcgatgacgctagggttatagggaattgttatacgaggttaccgaaagttgttcaaagtcccggatgagatcctggacgtcacaaggagttctggaatggtccggagatgaagattgatatataggacggatgggttcggacaccggaaatgtttcgggcgtcgccggtagcgtatcaggaccaccgggaccaccggaaatggttccgggggtccaccagccccgggaggatagatgggccaagtgccggagggaaccagcccctaggtgggctggtgcgccccccacacccagcccaaggcgcaacagggagggaggaggggcaaccctaggcgtagatgggccttaggcccacctaggggtgcgccactcccctctgccctggccgccacccctcccactcccatatggtggccgccgccccctagggagggaaccctaggggtggcgcagccctccccctcctcctataaatagagaggggttcggggctgttggaggcaccgttttccctctccctcggcgcagcccagtccttctccttcctcctctccgtcggtgcttggtgaagccctgccaggagacctcgtctctccatcgacaccacgccgtcgtgctgctggagatcttccccaacctctcattcctccttgctggttcaaggcgcgggagatgtcatcgggctgcacgtgtgttgaacgcggaggtgccgtggttcggcactagttcggaatcatgcggcgattcggatcgcagcaagtacgactacatcaaccgcgttcttgcaacacttccgctaggcgatcttcaaaggtatgaagatgcactcaccgctctctcgttgctggtctctacataggaaggtccgtgatggcgtaggaattttttttgatttttgctacgttacccaacagtggtatcagagccaaggttctctatgcatagattcgtagcacgagtagaacacaaaggttgtgggcgctgatcttgtcaattgcttaccactactagtcttatttctttccggcggtattgtgggatgaagcggcccggaccgactttacacgtaaccacgtgagactggttccaccgcctgacatgcatattgtgcataaggtggctagcgggtgtctgtctctcctactctagtcggattggatttgatgaaaagggtccttatgaagggtaaatagctttggcatatcaacgttgtggctgttacgtagctaagaatgcgttcttgctagaaacccaaatcagccacgtaaaacttgcaacaacaattacagcacgtctaacttgtttttgcagggtatgacatatgatgtgatatggccaaagttgtgatgttacatgtgtgatgtatgagatgatcatgttattgtaataggaatcacgacttgcatgtcgatgagtatgacaaccggcaggagccataggagttgtcaaaatttattgtatgagatgcaacgttatgttttcattactttactgcattgctaatagttagctacagtagtagtagcaatagttggcgtaagcaactccatggagacacaatgatggagatcatgatgatggtaatcatggtgtcatgccagcaatggtgatgatcatgcgatgccccgaagatggagatcaatggagcaaagatgataatggccatatcatatcattgattgattgcatgtgatgtttatcatgttttacatcttattgcttagaacgacggtagctaataagatgatccctcataaaatttcgagaacgtattcccctaagtgtgcaccattgcgaaggatcgttgtctcgaagcacctcgtgatgatcaggtgtgatagattctaacgttcgaatacaacgggtgtaagccagatttacacacgcagaacacttaggttgactcgacgagtctagcatgtacagacatggcctcgaatacaagagaccgaaaggtcgaacatgattcgtatagctaatacgatcagcatggagatgctcaccattgacgactagtccgtctcacgtgatgatcggacacgggttagtcgacatggatcatgtaacacttagatgactagagggatatcaatttaagtgggagttcatacataatttgattagatgaacttaattatcatgaacttagtctaaaagttgtctttacaaatattgtagatccaatggccaacgcacctgtcaacctgaacttcaatgcgttcctagagaaaactaagctgaaagatgatggtagcaactatgcggactgggtccgcaacttgaagctcatcctcattgcagccaagaaggcttgtgtccttgaagcactgctaggtgaccctcctgttctcgcagccgcccaagatgttcagaacgtctggcaagtgcggagtgatgactactctctggtcaagtgtggcatgttatacaacttagaaccggggtccaaaggcgttttgagcaacatggagcacatgagatgttccaggagctgaaactagtttttcaaggtcatgcccgggtcaagagatatgaagtctccgacaagttctttagctgtaagatggaggagaacagttctgttagtgagcatatactcagaatgtctgggttacacggtcgtctgactcagcttggagtcgaaattccggatgatgctgtaattgacagaatcctccagtctctcccaccaaactacaagggttttgtgctgaattacaacatgcaagggatggagaagaccattcccgagttgtactcaatgctcaaatctgcagaggtagaaatcaagaaagagcatcaagtgttgatggtcaataagaccactagtttcaagaaaggcaagggtaagaagaacttcaagaaagacggcaaagctgttgtcgcgcccggtaagccagttgccaggaagaagaagaaaaatggacccaagcctgagactgagtgctactactgcaagggaattggtcactgaaagtggaactgccccaagtacttagcggataagaaggccgacaacgttaaaggtatatgtgatatacatgttattgatgtgtaccttaccagcgctcgtagtagctcctgggtatttgataccggtggtgttgctcacatttcaactcaaagcaggaactgcggaataagcggcggttggctaaggacgaggtaacgatgcgcgtcgggaatggttccaaggtcgatgtgatcgccgtcggcacgctacctctacatctaccttcgggattagttttaaaccgtaataattgttatttagtaccagctttgagcatgaacattgtatcagggtcttgcttaatgcgagacggctactcatttaagtccgagaataatggttgttctatttatatgggtaatatgttctatggtcatgctccgctggtgaatggtttattcctaatgaatctcgatcgtgatgttacacatattcatagtgtgagtacaaaaagatgcaaagttgataatgatagtcccacatacttgtggcactaccgccttggtcatattggtgtcaaacgcatgaagaagctccatactgatggactattagagtctcttgattttgaatcatttgacacatgcgagccgtgccttatgggcaagatgaccaagactccgttctcaggagtaatggagcgagcaaccgacttattggaaataatacatactgatgtatgcagtcccatgaatgttgaagctcgcggaggctatcgttatgttctcactctcaccgatgatttgagtaggtatggatatatctacttaatgaaacacaagtttgaaacatttgaaaacttcaaggaatttcagagtgaggttgagaaccaacgtgacaagaaaataaagtgtctacgatctgatcgtggaggagaatattggagtcacgagtttggcacacacctgaggaaatgtggaattgtttcacagcttatgccgcctggcacaccgcaacgtaaaggagtgtctgaacgtcgtaatcgcactttattagatatggtgcgatctatgatgtcacttaccgacttaccgctatcattttggggatacgctttggaaactgcagcattcactttaaatagggcaccatctaaatccgttgagatgacaccgtatgaattatggtttgacaagaaacctaagctgttgttcctaaaagtttggggttgcgatgcttatgtgaagaaacttcaaccagaaaagctcgaacccaaagcagagaaatgcgtattcataggataccctaaggaaactattgggtataccttctatcttcgatccgaaggtaaaatgtttgttgccaagaacggatcctttctagagaaagagtttctctcgaaagaagtaagtgggaggaaagtagaacttgacgaggtagttgtacctcctctcgaaccggagagtagcgcagcgcgggaaattgttcctgtggggcctacaccaactgaagaggaagttaatgatggtgatcatgaaacttcggatcaagttactattgaacctcgaaggtccacaagggtacgctccgcaccagagtggtacggcaaccctgtgatggagatcatgttgttagacaacggtgaaccttcgaactatgaagaagcaatggcgggcccggattccaacaaatggcttgaggccatgaaatccgagataggatccatgtatgagaacaaagtatggactttggtggacttgcccgatgatcggcgagccatagaaaataaatggatctttaagaagaagactgacgcgaacggtatagtgaccgtttataaagctcgacttgtcgcaaagggttttcgacaaattcaaggaattgactacgaagagactttctctcccgtagcgaagcttaagtcagtccaaatcatgttagcaattgccgcttttcatgattatgaaatttggcaaatggacgtcaaaacagcgttccttaacgggcatcttaaggaagagttgtatatgatgcaaccggaaggttttgtcgatcccaagagtgctgacaaggtatgcaagctccagcgctccatctatgggctggtgcaagcatctcggagttggaacattcgctttaatgaggtgattaaagcgtttgggttcatacaggtttatggagaagcctgtctgtgcaagaaagtgagtgggagctctgtagcttttctcatactatatgtggatgacatattattgatgggaaatgatatagaattattggagagcataaaggcctacttgaataagagtttttcaatgaaggaccttggagaagctgcatacatattaggcatcaagatctatagagatagatcgagacgcctcataggtctttcacagagtacataccttgacaagatattgaagaagttcaatatggaaaactcaaagaaggactcagtcgccgaccacggcagcagatagagagaagatgagtactatcccctacgcctcagccgtgggctctctaatgtatgccatgctatgtaccagacctgacgtcaaccttgccataagcttggtaggtcggtaccaaggtgatcccggtatggaacactgggcagcggtcaagaatgttcttaagtacctgaaaaggactaaggaaatgtttctcatatatggaggtgacgaagagctcgtcgtaaagggttacgccgatgctagcttcgacaaagatccggatgactctaactcacagaccggatacgtgtatgttctgaatggtgggacagtgagctggtgcagcagcaagcaagaagtcgtggcagcatctacatgtgaagcggaatacatagctgcttcggaagtggctcatgaagggatctggatgaaggacttcatcaccgaccttggagtggttccaagtgcgtcaagtccgatgacactcttctgtgataacactggagccattgccatagccaaggagcccagatttcacgggaagaccaagcacatccagcgccgctaccactccattcaggaccaggtccagaggggtatctctgggcccactcggtagaacgtcatcacaatgagctcaatgtgactaaggagttagtcacgggatgatgtactacggaacgagtaaagagacttgcaggtaacgagattgaacaaggtatggagataccgacgatcgaatctcgggcaagttctataccggtagacaaagggaatcgtatacgggattaaatcaatccttgacatcgtggttcatccgatgagatcatcgtggagcaagtgggaaccaccatgggtatccagaccccgctgatggttattggccggagagatgtctcggtcatgtctgcctgtctcccaaacccgtagggtctacacacttaaggttcgatgacgctagggttatagggaattgttatacgaggttaccgaaagttgttcggagtcccggatgagatcccggacgtcacgaggagtttcgaaatggtccagagatgaagattgatatataggacggatgggttcgaacaccggaaatgtttcgggcgtcgctggtagcgtaccgggaccatcggaaatggttctgggggtccaccgggaggggccaccagccccgggaggatagatgggccaagtgcgggagggaaccagcccctaggtgggctggtgcgcccccacacctagcccaaggcgcaacagggagggaggaggggcaaccctaggcggagatgggccttaggcccacctaggggtgcgccactcccctgtgccttgtccgccgcccctcccactcccatctggtggccgccgccccccagggagggaaccctaggggtggcgaagccctccccctcctcctataaatagagaggggttcggggttgttggaggcaccgttttccctctcccttggcgcagcccagtccttctccttcctcctctccgtcggtgcttggtgaagccctgccaggagaactcgtctctccatcgacaccacgccgtcgtgctgctggagatcttccccaacctctccctcctccttgctggttcaaggcgcgggagacgtcaccgggctgcacgtgtgttgaacgcggaggtgccgtggttcggcactagatcggaatcacgcggcgattcggatcgcagcaagtacgactacatcaaccgcattcttgcaacgcttccgctaggcgatcttcaaaggtatgaagatgcactcacccctctctcgttgctggtctctacataggaaggtccttgatggcgtaggaattttttttgatttttgctacgttacccaacactacgttccccaacaatcttttaactcagtgcccagtgccagtttctgttttttccatgtttttgaccttttccagatgtgaatattaaacggagtccaaacgcaataaaaactgcgcgacaattttttccataacagaagatacgcaacagacgtgagaaccacggcagagggccacgtgggaggccacgatccctcagggcgcggcccagggggaggccgcgccctgcatgctcgtgggccccatgggtctcctctgtcctacttcttccgcctataaattccgataaatcatgaaaccaactaggagagccacgaaaatacttttccgccgtcgcaagcttctgtctccgcgagatcccatctggagaccgttatggtactctgccggagagggatccggacacggagggcttcttcatcaacaccattgcctctccgatgatgcgtgagtagttcaccacagaccttcgggtccatagctagtagctagatggcttcttctctctcttggatcttcaatacaaagttctccatgatcttcatggagatctattcaatgtaaccttcttttgcggtgtgtttgtcgagatccgatgaattgtggattcatgatcagattatctatgaatattatttgagtcttccctgatttcttatatgcatgatttcatatccttataattctcttcaagttcttggtttcgtttggccaacttgatctataattcttgcaatgggagaagtgcttggttttgggttcataccgtgcggtgtcctcacccagtgacagaaggggtagcgaggcacgtatcgtgttgttgccatcaagggtaaaaagatggggtttatgtcatattgcatgagtttatccctctacatcatgtcatcttgcttaaagcgttattctgtttgttatgaactcaatacactagatgcatgctggatagcggtcgatgtgtggagtaatagtagtagatgcagacagtatcggtctacttgtctcggacgtgatgcctatatgtatgatcattgccttagataactttatgactttgcgtgattctatcaattgctcgacagtaattcgttcacccaccgtaatacttgctatcatgagagaagcctctagtgaacactatggcccccgggtctattttccatctattactttcagatctatttactctttgtctctgtcagatctcactttgcaaacaatcgtgaagggattgacaacccctttgtcgcgttgggtgcaagtttgttgcttttgcgcaggtgtcttggcgcctcatcttgatactcctactggattgatgccttggttctaaaactgagggaaatacttacttctactttgctgcatcaccctttcctcttcaagggaaaaaccaacgcaagctcgagaagtagcaatgtgcacccttgatataacttacaccacaaactaatgcctacaccataaccggctttaaagaactccggtagtcatctagtacgaaacaagttgacaaaagtagttcgaggaggagaagttgacaagtttatatctaaagttcgtttgtaggagttgacatacctaaaatccgtccggttgtgctgaaggtagattccgaagacaaggaggtagccggcatggcaaggaacctcttggctctcttggccataattggatacctaggagcattcaccttccaccaatcaagaagatcaagaaatgtaccaggaggggcaacttcatcctctaagtagttcctcaactcactctttgatattcttgttgaacgggccgataagaaggactggtacgcagcttgaaccgggatactaggaatgcttgtagttgtagacgaagacgaacttgctccatttctagcccgcttatcttgggaaacacatttgtcatacaaggcctccaactctttcttcacaatagtcatttcagttctaaacctcggagtttcttttccatacagttctccaaaggcccactctatgtaattcatcttgcacataggagaaaataagcattctattaaaaacagcaagcatatgagtgaaaataggaagcattctattaaaaacagaaagcattggactaaatcatatgagttaattgaacaagcaagcatatgtaccgtggatcaaagttggttgcaatcaccatggcattgttcttttcttcccaatatttgtcaaacttatccaacacctcttcacccatttggttgtagtggtcactatcactagcaattgcatgtttgattgcaatcttgacaccaacaatgtatgggtagaagatgttcgaagtgggatataaacttcttgaaaatgcttttgtcacctcagccaaactcttaagtaatggagagataaggtcatacatgtcctactccgtgtttgtcggtgcccaagcatagttggcattggagtcagcatgagaggtcaaggtttcgttgtattggcgggcagtgctaatcatcttataggttgaaactccaccttgtttgacaacccaggtgtaaatggttgccaactttgacacccaagcttttgcaagtgtcaacaaaagcgtggagacgagaaggtgacctcttgaagtacttcaccgcctgtctcaaactctttatcaaattttctaggacatttatcccatcttgcaccgccaatttgaggatgtgtgcacaacaacgaatatgaaaatattgggcttcgaagttattacctacaacaggtaacttctatatgagcacaaataacaagtgtatagcaagaataggatcacaaacaacaagcataggaacaaaaacagcaagcatacctatccagtacaagaacttggccttcaaaacatcgattgcaccatcattgtttgaagcattgtctagtgtgatggacaattttttttgtctcaatattccattctgtcacacatgcatagagagcatccgcaatgacaatttcggtgtgaggaggatccaacactacgaaaccaagtacacgtgtttgcatcttccaattatcatctatatagtgtgcaaccacacacatgtaagataaggtttggttgcgtgtccacaaatccgtggttagagatatggagctcacaccccttaggacagatttaagcacctctttttctttcttgtaaaccctaatgcacttggctcatattgcctttcctcaaatgcatttataatttggattcatgcacttcattagaatgttgaaccactcatgttcaacaattcgaaatgaatactcatgcacacatatcatcttagcaataagctccttaatgattccttggtcgtactcaatggaggggctcatcattggaacacttgtcgtaccattggttttgcacaattcaaaagttgtttggatggcaaccctagctatcttggccttgtaattcaaacattttgtatgatgccttcaaatacttgaggtgctgccaccttgctcatacgcatacttctttggacaataattgcagtaagcctaaaacacatttttctggggttcttcaacgatggctccttgaccttgtgaaaatgggcccaaacatctgatggtgtcctaacaggagcattggctcttggcctcttgttctttttcttgttcctttctcttgtctcatcctcaaagtcctcactagagacgccatgcacaagtgattcctcggacatagtgtcaccttctagttcatcagctgattccttgtacccatttgatgtatcatcatctaatatatcatcacctccttgcaatggcgggaccacaaacagattctggtcgtcatattcctgatcgtccttttccttgttctcctccatgtcctcatcctccccgttctcctcattcaccttatcctattgcacctagcacacatgagcacacaaataagggaaaacatctatatggttatatggaaatatggatacatcaagcatcaagcaaagacatcatacacgaggctgctcggagccggttgtggagccagacgcagcggcttctgcggcacgcacgccagcaccggtgcgatcggggagacatggaggaggcggaggtgtttctttaccctccaaaaaactctcccattggggcattgggaaagtcttttgccttcctaattggtgacttatgcttgcccttcctcggaaccggcagagggagcggcgaatcttgcctaattaggtaattcacgctcttcgcctttgtcttcgacttcccattctccttctccttaccagccgccccctttcccttctcatttaccttcccttcaccattccctagaaaaaacaacacataatagcagtcaatatataaagtttgttgttgaaatttcagaaatgaaccaattaaagaaacttcagaaattacaacagcagcagcagaaattatagcagcacagccagagaaattacagcagcagcagcagcagaaattacggcaacatcagcaacattagaaattatgtttcttgtattatgtcaagccaagacaacaacaacatattaggccagtgaaccaattacagcagcaacggtttctaaagaaaaaagagagaaatcggcagccaactctagatccaccgggaccaccacaaccagattctacacaaacaaattcatgcaccaccaccagattcatgagccagcagcggtttcagaaatttgaattcatgcacaaccagattctacatccaccatgcagccaactctacatccacaaccaccagccaccagcagcagtgacactagactgaaacaaaatacagtaccaactctgaaccagggaggaactagtcaactagggagggagggaaggcggcgagccggcgaggttacctcttcctcctcgtggcgctcggcgaggaacaagggaagaggggatcgacgccgtgctgcccttgctacgaccctggcgcgcaggtgcttctccagcttggactcagacgagatgtcactgtcggtgaagaggagaggccgcgggcgacggcactgttgccttagggttagggatggagaggaggatgcgtctgtgctaacaaggaggaggaatcgagcgaggaggaggaggcatctagcgagggccgagacaagacaccagatcggcccttgttgggctcggtccgcttgtccggcccggctaaagaccggaccggaccaaacttttttcggtctggattactgggcccggaccagattattttcttgtcgggcctcgatcgagtgggccaagaccgaacgggccgcgagcgggctaaaaagcccgctcggtacgtccagactgggcagtagatgcaactccaccccctccgacgtcggtgatgcggccacctccgctccctccttcgcctccggctactccaatgtggcttccttcgtcgctatctccgcctcaacctcgtcgaagagggcgtcggcctccacctgcctctgccagatgagccggcagttagcctccacctcggcctcatcccggatggaatccaagatggtctagtgctccgccatctcatcggcttgggcgacggtgaactcctccttcacctccgccatgttgaagcccgaagcgtcctcctcctcctctgaatgctcgtcctccttctctgtttctggtgagtccggaggggtgacccgcagagatgctggcggcgcgccgagccaggatctccaccttgatctgcatggggcgcttcggcgtaagctgagcataggtggatcctctggcggaccatagtgaggccgaagagcgggggagaggaggcggatgggttcgcgtggcggcggatgtagggcgggggtgaatgtgctagggccgcgggtcgccgaccgactaaaatagccggctctagcctcgggcggcgagccggagcaacgtcacatggcgttcacacctcgtcgatggtcaaggcgctcgtcgaacagtcgggtttccgggcgagtccgcgtggggccacgccatcaggccggcgtggcgggcgtgcccggacgcgttcgggctcccatatatccgtcacatatttgggctaaaaataaagggtgccggtcagtcccggcatttgagacccgtttgagagatccgactaggtcgaatttttgtaatcggtgagtgaccggtccggaagtttaaaacagttttgaaggatgggatgtagattctcttacattaactgggtgacgcatgtgagcatgccctgtggaagactacagagcagtgtctctatgcgtgcacgtgatcggtcgactccgttgattatttgtgcagcgtttggagagggacagagtcagttacagatagaggccagccgtagagtggatctcgccgagggggctccgccggccgaccaccggtgacctgctcgccgatgagtaggtgcagcggctggaagaggcgcgtgctggggaaggcattagatctcgcaggtataaatctgttctcctgttcaagatccactataatcatggaatttagtttgtgcatcttaactgcaaattgttggtcatccaccacatattttcttccgttctaatgatccaatccttcatctttactctagcttctaggaaaatcatgcgtggccggccggtgtgggcatcgttggtaatccttgttagatctacaacgctaatttggtcgtatgtgagtaactccaagcgtttgctttagtgaacacatttgttgccagctagctagcacacattttgcattttcctttatttttgaagaaacatatatcagatgcatctggatttgtttgccaactaaacgccgcaaaaaacttcatataaatacgccactgtgggatgaaattcttcactgtttgcagacataaaaagagatgcagaagaaatgaagagcacactgttatttagatgttatcatccactgttttttagtgttggtttagtgtgtgcacctgaagtgcaaagggttggtgattcggtgtagatttacagtgtttggtataagctgtttcttccctagggtttgcacattttgtttgccttgataactagctcattattcattgttatcttctctttatgaatataaatagtatatgaagcatgttgactagcctgccaactaattgttgcaaaatgttcacatgcataggtacttgggaatgggattggaatcacaattgttgatgaaatgaagagaatatattgctatttgacagctaccatcaaattcttttagtttgaacattgtcatacctcttttttcctgcaaggaatatattgttgaataaataagcaattttccgagtaaattaatccatgaaataattactaacatggcattgactagattcatgacatactgatcactgagcatactagcaagtactacgcatatagcagaaacatctacgtatataaccagtactactagtacagacataaacaggagagagacataccctccaatcggccatttggccgtagcagcagcggtggcggcggcagcatcttctgccgccttcttatcggcttcggccttctcgcggacgagacggtcagcttcgcttggtgaagacatggcgatgaagagggcgacgcggacgtagacgaagtagacggacggaggcgagcagtcgcgtgatcgcttcccaaaaacctaatcgcccctcttccccgtacaggaaccggagaggcggggtttcggaggcctgctctcccgtcgaccgtgtacgcggtgaacgggatggagtcgccggcggtagcaacagcaaaggaacgaaggcgtgaggcacatgcgatctgattctcgtgacggctagggttgcgttagcgctgcttatataggcggctgggcggagagacgtgggccgaacccacatccgagtcggtaacagccccacgatccgacgtctcagatcgtgccgtgtccgttacgtattctccgttcctgaccgacaaaaataagcgcgtgggtacgagctcggctcggctcattcccgcaacccgcggcgcgtcgtgacgaggcgtggcgtggcgaggcgggctgcggaggaggagtgcgcgagggctccttctcttctcactctccaatagcatgtagaagagagacccttataaaggagtccaactcctcctccactagcaaggtgggactaaacttccaccaccttgtcatgccaccacctacatgggcccttggagatttttctgaaattctcttatgggcctaaggcccactactaatttcagcaatcccccaccagatctcaagggcacatcgtgttccctcgttccattcactgttttaatataccagcatttcagtgaagacctgttaaggttgagcttcacctagaacacgcagctacacccctttacaactgaacaatggactatgccttgaattgtcagtttggcgtaaagaagtttcaccacaagtcttactagtactagactaccgaaggccgacccctcgggtggagcatataagtcacactcctggcctattcatgagtttactagagatcaccccaatctcatagactgtgaccagcagtcggactcatataggtgtgttcttccaaagatcgctctgtaggacagcatcttgcttacacataagctttagaacacattaagacagtagtcatcctaccatacagtatccgagagtattgcatctccaacggagtgggttagtaaagttactctcctcagttcaccactggcttgttttcccaggtcctacttcacgggatctccgatcatataggttgggttactaccatggcaactcatgtgggtctcatacccatctccctcgatgcactatcgatcacaacacgcgatagccctttagtaaagggatctgccagattcttagccgtttggatgtaatccaacgctatcactccggagtttcttaaacgtctgacagccttcaatctcattcttatatgtttgttggacttcatgttgtcctttgaactcttcactttgacaataactgtctgattatcgcagttcataaggatagccggaaccggcttctcaaccacgggcaagtccatcaaaagatctcgaagaaattctgcttcgacaccagatgtgtctaatgctgttaattctgcttccattgtcgatctcgttaagatcgtttgcttgcaagacttccaggaaacagcaccacctccaagagtaaacatatacccagtcgtggccttcatctcatcagcatcagagatccaattcgcatcactatacccttcaagtaccgacgggaatcccgtctagtgaagtccgtggttgatagtaccttttagatagcgcataattctttcaacagaatgccaatgaacatcacccggattggaaacaaaccggctcagtttgctcacagcaaacgcgatgtcaggcctcgttgcgctagttagatacataagcgaaccaataacttgagagtatctcaattgatctatagctgtgccattgaactttcgaattagcacactaggatcatatggtgtttgagaaattttgcagtcagaatatccaaatcgactcaagatcttctcaacatagcgggattgcaaaagtgtaatcccaccctcatcatctctcaagagcttgatgttcaaaataacatcagccactccaaggtccttcatctcaaagttctgagatagaaaggacttaacctcctcaatcaccttgaggttggtttcaaatatcagtatgtcatcaacatacaagcacagtataactccttcgcccccaccatggcgatggtatacacacttgtcagcttcattaaccacgaagccaacagatgtcagagttgtattaaacttatcatgccattgcttaggtgcttgcttcaggccatataaagatttcaacaacttacacacttttccttcctgaccatctatcacaaagccatctggctgttgcatatagatttcctcgtctagctctccattcaggaaagccgtcttaacgtccatttgatgaacaagaagagcgtgcgaggctgccaacgagagtagtactcgaatggtggtcagtctggccacaggtgaataagtatcgaagaaatcttcttcttctttctgggcatagcccttagccacaagcctagccttgtacttctcgattgtaccatcaggcctaagcttccttttgaacacccacttgcatcccagtggtttgcaaccatagggacgatcagtaatttcccatgtcccattagccatgatggaatccatctcgctacggaccgcagctttccagtaatcagcatctggagaagcatacgcttctgaaatagaagtgggattatcatccacgaggtatacgaggaaatcatcaccaaaggtctttgcagtcctttgtctcttgccctaccaagggtttcctcgtcatcctcctcaggactttcatcatgtgtttgttcataatattccataggaatggcaggctcaggagttgtatcagattcctgtctagaagtgctttgcatatctctcatgggaaaaatatcctcaaagaatgtagcatccctcgactctattattgtaccgaccttcacgtcaggtacctcagttttcactactagaaatctatagcctacgctattcttagcgtatcccaaattaacgcagtccacggtctttggtccaagcttacgcttcttggggatcggcacattgactttcgccaagcagccccaagtacgtaagtatgagagcgtcgtccttctcttagaccattcctcataaggagtgacctcattatcttttgtgggaaccttattcaggacatgacacgcggtcaatatagccttcccccaccatgccttggataaacccgatgtatctaacatggcgttaaccaaatcagttagagtacggttttttcgttcggcaaccccgtttgactggggtgaatagggaggcgtcctctcatgaataatgccatgttccgcacaaaaagaatcaaactcgtttgagaagtactctccaccacgatcagaccggactcgtttaattttcttttcaagttgattctcaacttcagccttatagattttaaagtagtgtagagcctcatctttagtatttaacagatatacatagcaatatctagtggaatcatctatcaatgtcatgaagtatttctttccacctttagtcaacacaccattcatctcacaaagatcagaatgtatgagttctagtggcgccaagtgtctctcctctgcagccttgtgaggtttgcgaggttgctttgcttgcacatacgaatggcacttagaacctttggctaaagtgaaactcgggattaagtttagttttgctagccgcgtcataacaccgaaacttatgtgacaaagacgtgaatgccaaacttcagattcattaacactggaatgaatattgttcatgactttattacacaaatctgctagggaaaggtggaacagacctccgcactcataaccttttccaacaaataatccatatttcgtaacaactactttattagactcaaagaccaacttaaacccttctctacacagaagggagccactaacgagattcttcttgatggcggggacatgctgcacgttcttcagttgcacgatccttcccgaagtaaacttcagatcgaccgtgccaacaccaagaacagaagcactcgcgccattccccatcaatacggaccctcgacctgtggcctggtaagaagagaacaaagatacgtcagcacacacatgaatatttgcacctgtgtctacccaccaatcagtaggttgacaaaccgaaaatacagtaaacaaattaccgtacccaggtgcaccactttcattgttgctcacaatcatattggcagacttggagtcctgccctggcttcttgtacttatttgggcacttgctggcccaatgttcctcagaaccacagttgaagcagccatctcccttcttgttcttcttgaagggcttcttaccctttttcttaaagtcggtattctgttggacagaattcttccccttgggcttgtgggaattgaagttcctgtgatgtaccatattggcaacagaaggaccttcaactggttttccgtgcgagtcctttgctctcgagttctgctcaacactcagatggccgatgatatcctctactgagaattcacgcctctgatgtttcagagtagtagcaaagttcctccaggaactagggagcttagcaattatacaccccgcgacaaacttgcccggcaaattgcacttcagaacctcaagttctttagcaatgcatattatctcatgagcctgttccaatacagaacggttctcaaccattttgtaatcatggaactgctccataacatacatctcgctcccagcgtcagtggccccgaatttagattcgagggcctcccacaagtccttggcaacatgcatatgtaaatatgcatcaaccagcttatctccgatcacgctaatgactgccccaaggaataggacggtggcctccttaaacatcttctcctgttcaggagtgatagttttcgtaggagtgacaccggctacccagaacacgttcatagccgtgagccataaggtggttctcgtttgccaacgcttgaaataagtaccggtaaacttatccggtttcagtgcagcagcaaaaccattactcgaaaaattcctacacacattaggtttttggattgttgaataaagaggcaattttccgagtaaattaatccatgaaataattactaacctggcattgactagattcatgacatactgatcactgagcatactagcaagtactacgcatatagcagaaacatctacgtatataaccagtactactagtacagacataaacaggagagagacataccctccgattggctagttggccgtagcagcagcggtggcggcggcagcatcttctgccgccttcttatcggcttcggccttctcgcggacgagacggtcagcttcgcttggtgaagacatgacgatgaagagggcgacgcggacgtagacgaagaagacggacggaggcgagcagtcgcatgatcgctccccaaaaacctaatcgcccctcttccccgtacaggaaccggagaggcgggggtttcggaggcctgctctcccgtcgatcgtgtacgcggtgaacgggatggagtcgccggcggtagcagcagcaaaggaacgaaggcatgaggcagatgcgatctgattctcgtgacggctagggttgcattagcgctgcttatataggcggctgggcggagagacgtgggccgaacccacatccgagtcggtaacagccccacgatccgacgtctcagatcgtgccgcagtatgagctcggttcggctcattcccgcaacccgcggcgcggcgcgtcgtggcgtggcgtggcgtggcgtggcatggcgaggcgggcggcggaggaggagtgcgcgagggctccttctcttctcactctccaatagcatgtagaagagagacccttataaaggagtccaactccttctccactagcaaggtgggactaaacttccaccaccttgtcatgccaccacctacatgggcccttggagatttttctgaaattctcttatgggcctaaggcccactactaatgtcagcatatatcagatcaagcatcatgtcatggacaccataagcctttctgccttgatacttgatgtctaccggttggaatttgcttctctttatgagctcattcaagtagctctctcgtagttcaaacgggtcaatttctcatttacaagatacacaaatccttcatcttcagctacccatcaccatattaactggtctctcttaattttgtgatcttctggatatatgcttatatataataaatgatgtgaagggagatcatagaacaacaacataatctttagtcttaagcaagttagggcagactagagataaaacacgacaggagccacacacaccaatgatatagaaggtaccaaagaaatagtaaaagaagttgttgacttttagattatgtcaaagtgataatcaggagtcaagcttctttcactactagttttgatcttccttttcatctataggattagttattatatctaagtacgtttcgagaagattagaagattaagcaaggtcacctgatattgataggtaaatggatagctgaatgttttgtttatcatggaaaacaagagattaccctatttgtgcttggtgaaagagtgactcaatgagatcatgaataaaagcttgattcaaccaatagacatcaatttaatgaaggcattaaaaaaatcttatcatgttcataatatgatgagtgatcccatatgtttttgccaagggaagaaaaccacttacatggcaccgagtgaagctgatctatacaaaggcaggatttgaagattatccttctgtaagagcatgtcagatatgaccaccatccgaagcagcaatgccacaagtgaggaaacttgcaatatttttatctgctattcttgaactagtgcttcctgtcgagtacctgtgttggatttagaataatgtggtgtatgtttcttgttatttcagactgttgaaattcagagaacactgcatgtgtcttggcgttttgattcttcatccgtcgtccaccacagattttcttcccttctagatcagtcaacattcactatctagtttcttcgaaaatcattgtttcttctacgtccttcatcgttcccttttagtttcttcatcgtgcattgttggttatccatgttagatcgaccgtgctaatttgttttatgttagtaactccgagggtttgcgttagtgaatctattcattgccagctagcttgcacacatttaaaactctcatcttatttttgaagaaacatatatcagatgcatctggatttgtttgcgaagtaaacggtgcaaaacttcatataaataggtcagtgtgggatgaaaatctcaattatttgcagacgtacaaagcgatgcagaagaaatgaagagcacactgttatttagattttatcatccatagtttttagtgttggtttcgtgtgcgcaccttaagtgcaaagcattggtgatttattgtagatttacaatgcttggtataagctgtttcttccctagggtttgctcattttttgccttaacaactggctcattattcattattatcttttctttatgaataaatagtacacgcatgttgacttgcctaccaactaattgttgcaaaatattcacatgctcatgtacttaggcatgggattggaatcacaattgcagtggaggaaatgaagagaatatcttgctatgtgactcctaccatcttgttcttttagtttgaacattgccatgagcgtttctctatgcaatgaatatatccgatcaaacatcatgttatggtcaccataagcctttctgccttgatacttgacgtctaccggttggaacttgcttctctttatgagctcattgaagtaactatctcgtagctcaaatgggccagtttctcgtttacatgacacaaacccttcatcttcagctatccatcaccatattaactaatctcccttaattttgtaatcatctcgatatatgcttacatataataaatgatgtgaaggtatatcatagaacaacaacataatctttaatcttaaggaagttagggtagacaagagatagaacacgacaagagccacaaacaccaatgatatggatagtagcaatgaaatagtaaaagaagtttttgatttgtagattatgtcagatctagagtcaagcttattttactactagttttgatctgtgttatctataggatcagttattatatctaagcatgtgtttagcagattggaatattaagcaacatcactttatttgtaaatggatagctgaatgttttgtttatcatgaaaaacaaaagattagcttatttgtgatcagtgataagagttgctcaatggcatcataaatggaagcatgattgctcaatagacatcaatgttgacgaagggatggacaaaatcttatcgtatacatgatatgatgattgatcccatatgtttttgccaagtgaagaaacccacttgcatggcactaagtgaaaacggtctatctaaaggcaagatttgaatattatccatccgaaagagcatgtcagatatgaccaccatcagaagaagcaacaatgccacgagtgagctctcttgtatacagtggcggaggacgaaacttttttaaggtggggcgaactcttaagcttaattttctttatgcaaaacaaactataatacaactaacagtgcacacaaaaataaattcaaaattcaaaaaaatattacacctgtcagcatgtacgccaagtgcgccagtctccaactccctcaggaaaaaaactccctcgctctcgcttgggcgagggtctgaagtatgacgtggggtggactaggttgagcgaggctagtgtgtgacgccatgatctgctaactcctacgtgctacggcccagtaaggtgtccaggtgggtggcatgttcaatcgtggcccaataaaaacgtttaacggtgattcttctttcccaatgatcttttagcgatcaaacatgtatacatatataacaaaatcaccaaaaatcaaggtagggcgagcgcccaacctcgccctaccgggagctccgcctgtgcttgtatatccatgtgcaattgtcgattcagtgtcgcgtatttgagcgttatgttctacatgtgtttgatttagaatattgtgctgagtaattcttgccaattgagacggtgagactcaggaacactccatttgtcatggtgttttgatttgtcttctgcagtgacatgaaactctaattgtaattgtacccacgcatgtgtgaatacatctatcactttggttagattcaagaagcaccaagtgtctgcagcgcctcctgcattttcctaatgacgaacttccctctccgtttctttcttttgtaaggaaaagttatgtacttatgatgtatggctggctggttaattttccctcaatcaacaacctgtttgtagggcggccactgatgtctggtttgcttgttgtcctgcattcttcattacactccattgtttataacggctttatttcagactcacaaactattaagccatgctcagtttgtcccatgttctaaagtttcatcttctacttgtcatgctggtttgatcaaataaacggggatatcagcagtgtcattttgatgtaccggcttaggaagtctattcagtacatatttctctttgattataactgggacttgacttcccatttcatctcacatgtaccttcgctgccagttactctgtagaagcattggtcctgaactgatgcaacactttctgtatgagagaatgatcggatgtgccctcaactcaactaactcttctatcagtatataggggagcaaatcatgtgatgttttatttgtctgtctgttttgcaacaaattgtatagacgaagacctgtctactagcaacttgatatgatagattcatagaagcatcttgttcagttgcccacagacttgttattgttacagtttgatgactcttgccgcgatctagctacgttgataggctgctttggctgctttggctgagctatagatgcagatgatgcaaaccgtgtcaatcacagtcattgtttccacagatatatctaactgaaatctatttaatttgtgcaagagaatgagcatcaccgactgaccatgggcaaaggaatgagcatcggcgagtgatctgcaagaacggcggttgtaggcaacaatccgagtgccttctttgcaagcgccattttctttctgaaaacatgaggaattgatcttatcacaaccatatataatccctatgtacctaaataattatagtttaggagaactaactagttttcttcaactataattatttaagtatagaggaagtaaatgaaatggaatgggtaaaatgggtacgcataatgatcacgtggtatctagtttgattaatcccacagaaagaggtgccagtcttttctatctaatgcaaactaatgcatctgctcagaggcatctctccctaggtaatgcaaactaagcagtttataactaaagtaatgcacatgcatgctcagaggtatagatcggatcgtgtccggcacataccatttcacaagcgccaaagaaacgggcgggagattaaatattgtagtatgagtggatcagtactagtagtactctaattaactagagttgctcacacgatacaaatggcacgacagcacgcgagtaaagtgcacgcatggagacaggtgacgtgcggtttaatttaaccaggtcactgcagtcgaagcggcatccaagggtaacttttcgcccatttcaagatcgcatcaaccttcggcctatcagcaactactaccacctagcttcagttgtaggatagccaaacaaaaattgctagaggtccttcctggtaacattctactcactccgtcacggtttagaaggcatagttagactttcatgcgttttcaaaatagacaaagattaaggcgcattgtatttactcctagcagctaattagtactccgttgtattacttctatatacatgcgcagtgtgaatgctatttttaactcatttcacagccaatcaataaccacctaggtcctaaagaatttgcatgcacgccttctaaaccgtgatggagggagtagaagatttcacaaattcatctcattactctctcgatccaattacaaccttttcttaaaatgcgttaagatctaccgtctcttttcctttcgttgcgcaccaaaaacaaatatacgcatcgcgctaccgcacgtcttttggagatgctcttactagtaccacctagtttcaattgtaggacaactttctagatgatttcacagaatgatctgattactctctgggtccaattatcatcattttttaaaaatgcgttaagatctgccgtctcttttttaaaaatgcttaaacacacccatgggtgttgcacacatggctttagggagcagcaggaatctctctgatttttctaaatcaacgcttggtgattggtgggacggcttaattagtttaacacagccagttcagtccaagctaggggcatctccgaggccattttctccagtctcaagtttgcatctgagccttgtgagattaacacgtatctactactaccacaaccgctgatacatgggacccagctgtccacgggcccgcaaggcagcccgcctatgcacatgctcgtcgtacccaatagcggatcgtcattaatttagtacgtatgaatttatactccccaacgctggtttctatgtcttattagctactaagtttctccccggagtgccttcggagcaacaccgtagcccttccacctttcttacactaaacatattacgagagaggtcgaggcatggagatcgccataaggggctattggccctctcctcccgaagctcggtgagctgctcatcggcgagttcaccatggagaaacaagtgagaaagggcatcgaatctctcgtaacagagctgaaattgatgcatgttgtcctcgacaaggtgtcgaaagtgcctgcggaccagcttgacaagggggtcaatatctgggcaggaaatgtcaaggagttgtcctaccaaatggaggacatcgttgatgccttcatggtgcgtgtggggaatgatggcggctccaccaacccgaagaacagagtcaagaaaatactcaagaaggtcaaaagattattcaagaatggcaaggatctccgtagcatttccggtgctttggaagaagtggttggtcaagcgaagcagctcgctgagcaacgtcaaaggtacgaactcgtacatgacaccgggattggttctagtattgatcctcgtgtgatggctctatacaaagatgtgacagagctcgttggcattgaagatacccgagatgagttgatcaacatgttgactggtggtgatgaatggttgaatgatcccctcaagacaatctccattgttggatttggcgggttgggcaagacaactcttgcaaaagcagcatatgacaagatcaaagtgcattttaattgtgatgcatttgtttcggtttctcaaaatccggacgtaaagaaagttttcaagaatattctctatgatcttgacaagcacaagtatgcacacattcgtagcgaagactgggaagaaagacatctcattgatgagctcgtggaattccttaatggcaagaggtatatatgttttttcctcttacaactcgatgaccatttagtaaaatcatgagacttttggcatagtatatatgtattcacacatcatatcattgatccactatatataattttctagtgttcatataaattggccaagttttctctgctgaattttcacttggatgtcatataataattgttatgaagatctaaaggtttttcttccttgattgaaagatggttcaccaaattactagctagacgccttgtgttggggtttacttgctggatgctttgtgttggattttctagcacaacgatccttttctggttaatttattacatacttctaatatacgatgtcacattgggatattttttgttaaatacgtaattttttcctgtcattgttgtttgatttcttttccctattttggatgcttgcagtataagtttaaaattgaaagggagatgtcgtaaagcaaaacttgattgatttttattagaatattctttgtgcatttgaaatgtatcggacaagcacttagtttgaaaaattaaatacttaactcgcacatttccaatactagattttatataatgttgatatatttggcacaaatgttttccctgtgacagttgtttcagggttttccctaatatgagtacttgagaaggtgaaatacacgtcaaaattatacataatgccaaaatgaaactttgttgaaatttaatttagtatacttatccttttaagatagttggagtgtgcatacataccttagcatgcccatagtaaaaatacttaggcataacttgacccgtgcaatcaatctaatcagaagcagactagatgcatgcacatattcaccacgtccaagctaaggcaaaaaaggtatattgtttggttttatgcacataatgacgggtagattgagcacacactgaaaaaaaaatggaagaccacaagccttataaaaacttgaaataacttggataatataatttgccttaacatggcaacttctggaaatcttgtattgtgcttttatatattattttacatatcagttgactaattattaaatttactcacaaaggtaactcatcgtaattgatgatatatggagtggagaagcatgggagttaattcagtgtgctttttccaagaagagtcccgggagccgactaattacaacaacccgcacttttagtgtctctaaagcatgttgctcttcgaaggatgatatttacagaatggaacccctttctgatgatgtatcaagaagacttttctgtaaaagagttttttctaatgaggaagggtgtcctcaacaattgttgcaagtatcccaagacattttgaagaaatgtggcggcataccattagctattattactatagcaagtcttctagctaataagcatgagataaaagaaaagcaccaatggtatgctttgctcagctcaattggtcatggacttacagaagatcgcagtttgaagcagatgaaaaagatattattgttcagctactatgatctaccttcgcatctgaaaccttgtttgttatatctttgaatcttcccagaagatcaagtgattatgagagatagattgatatggagatggatatccgaaggctttgtttacagtgataaacaagaaactatcttatatgagcttggtaacagctacttcaatgagctagtaaatagaagtatgatccagcccataggcttaaagtcctttggttcgccttaccagccaagtgggtctcccgtgaaagctttgatttgggcatgcggcacctcccttccctggagcgagtccatgtgcatgtttttaagaaggaagctagcaatgcagaggtggatgaagcggaggctaagctgagggccgcagcggatgaccatcccaaccgccccaccctgcgcatcatcaggaaaaggtccgcactgccgtgctacgtacatttgttctggtccctttgtgttttcaacaaggttcagtcctcatcttccttcttccttctcctttttccctttgcaggtagaggagggattgatttaccaggtgctgcacgcaggtactacttactccatcaattaattactactagcgcccaactattctttcaccattcctttagcctgcgtagttcaatcaggtttctaaagcgtagcgttgcggcgtatttaaagcgtcaggaatattgcaatgtgaattccgctttggttcaatcaggtttcagcacaagtcttgttatttatgcatgatgcaaaattacatgtagcatgataaaaatgaaccgacaacccaacagtatagatgcatgtgcctttttctgtacttggatgacctctgctttctttctttctgaaacattgcactgaagcatttctatgcgtatctcttccaaatggcatggcaggtagcatactactcctaggatctagcagatgcccttgacatggattcgatcgtgggcgcctccaacaactcctcctgtactctgctgtttaacctgtctccactctgcatccaaatgaacctcctcattctgtctgcttatgtttggattctcttcacgctttcgccaactcaagaaccattatgtttgagggcgccttccccatgtgtttcgccctcgatgaaccattatttatgacgcactgcctggctggtttgcttgctctcattccgcattgcactgctttgtttgaagattcgtaaactatgatgtccggttcagtttgccgtattgctttgatgatgaaataaccaggcctgtattaagtacatctttgtattgatttacaactggaatttgaatatctcttgtatactaccgcatgccttcgctgtcatctagtaatctgtgagattattggccctgaactgatgcagtgttttctggatgaaataatgattcggtgtcccttcaatgactaccttaattatagatggagcaaatcataagatgtttcttgcttgcgatgatgcaaatcatgcgatgtaatgcacatgaagacccgcttattatcaactcaataagttcatgtagacagatatcatgacagtatcttcttatgttgcccccatcaaacgggaggggcgttttggctcccatgtcgaggtgatcccggtgtatagtcgtcggccggcggcgggcaccgaagaggagcggtgaattagacatggcgatggattttccatcgatccggtcgacaggtaatacctttctcccccagaaagctagtttcaggcttgtagattccatcttagatgggcatagtggatgcaggttacccatcttcacggagaaggcagagagcgcggtagctcacatcggcatgcttggagccggacttggtgcagatgaagaatcggcgaactgatctcgtggggaacggggggagaccgccaacgaggaacagcgagattctgggtgcagtttgtcggggctgattgggagtgctgcccgctacggggagcaaccgagtgtggccgctggtggtggcgccatgtctgattttacagctgacagaatgcataaattttcagttctttgcaatcgttagtgctttgtaaatgattagtgcatgaacaattgttctagcgattctgaaataatatgctaggtgctaaaataatttcagttctgaatgattctgaatttcaatgacaagtgctattgaattaggttcttgcttgtttaatttcttcctgcataataggttcggttatttttttatatattttagttttgagaatctaaatatttaggtgcttagtgcatacttgttgttgcctgtgtcgaaaactgcaagtgtctgaaaactgacttgccctgcttttcacctgatctctgccccatgtagatgtgggtgcccctgctttgatctaaaccgcattacaaatgattggtactgcccatttattgtcggataagcccactagatcaacttagcgtgacataaacatttccaactatggcaatgaaggcaaccagcacaagtacagtcaccatgaggttggtgaccgcaaccatgaggttcagccttgccaaatcacgatccaagcatgccgatgcatggataggtggagccgaggaattcccaacgaccatggctggaatgcaaatggccaggatccggggcgacaggtggaccaggaagatgcctgttatgactcagaccactcgtagagtctgcacttgttgtagagtctgcataggataatcgtcagtgtatctgctaaaaacattcagtcttcatttgtagaaattgatccccggggctagatccaaaaacactacaaatgaacgagattatcttgtcaccgcacaaggagcatggaatcagtgcgagaagttccattctgcgaggtgaaagataaaaacgccatggatagattgagttgttttgccagtgctgaaaattcttccgatgtgggttggagttgggcatttattgcagtgtggagagtgccctgatttccgttgtacacctctaagcgcaaacgacaaggcacatgaacgccgttgctctgtccgtcgcacatgaacgccgttgctctgtccgtctaaaccaacggcaaggaaacgggcatgcagcattaaatgtggaccaatccatgggccctgacactgttctaaaatagattgcccatcgcgaaaacattgctgaataggagtacttttgtccgcttctcagttaaaaactactaccatcaccgcaaaaataaaaagagttaaaaactattcccttcttccctaaatataagtttatttagagatttcattatgaactacctatacctgtatataaacatactttagagtgtagattcattcatttgttctgtatgtagcccgtaataaaatctttaaaaatacttatattttgaatgggagggagtaccagtcagaaattcagattaagtacgacattcatttttcctgtgaagtgatgaattgtttctatccccttgatcaagtgcatgctctgtctgtgcgattgtgcgtacccggaatgtgatcggtagatcatttcctgctttcttccctctattggagagtcgagtttcgtcagtactcagttcgtgagatcacttgaattttcatcaccttttgtttgcatttgtttctcattggctttccttgcattttctccagcttacaatctctatcatctttctctttgtctaaaactggaaattgctttataactaagataactagatgatgccccgtgcgttgctgcggaaaatatgataaatagatatataaataggtgttgaaaaacaaaaactatttcctaaaaaatattaggattgatctcattttatattttaggtataataactcatatggagcatttgacaaaagatgcataaaaaagtgtaacatgatctacgtatattttctctaaaatatacaccgcttatgcccataacaaaaattagtgaaataatgtgtagattagggcacatattataatataacttatgaccacatgcatgacttgatgatgtggcatggttacatgaagaaaaataaatccttataactaaatgcatgacttgatgatgtggcatggttgcatgagaaggaaaaataggtagtgggttgcaactatttaagaatagaagatgcgagaagacgatgtcatccactttcctgttatttagacctgttgatccacttctctgatatccctcagacctcaacttcgtccaagctgtccctgggaccatgtcgggtgaaggtgttggaaatatgccctagaggcaataataaagtggttattatcatatttccttgttcatgataatcgtctattgttcatgctataattgtgttaacaggaaacaataatacatgtgtgaatgaataatagatcacaatgtgtccctagcaagcctctagttggctagctcgttgatcaatagatgatcatggtcatggacattggatgtcattgataacgggatcacatcattaggagaatgatgtgatggacaaggcccaatcctgagcatagcggtagatcgtgttgttcgtacgctaaagcttttataatgtcaaagtgtcttttctttcgaccgtgagattgtgcaactcccagataccgtaggagtgctttgggtgtatcaaacgtcacaacgtaactgggtgactataaaggtacactacgggtacctccgaaagtatctgttgggttggtacgaatcgagatcgggatttgtcactccgtgtgacgaagaggtatctgtgggcccactcggtagaacatcatcacaatgagctcaatgtgactaaggagttagtcacgggatgatgtgctacggaacgagtaaagagacttgccggtaacgagattgaacaaggtatggagataccgacgatcgaatctcgggcaagttctataccggtagacaaagggaatcgtatacgggattgattgaatccttgacatcgtggttcatccgatgagatcatcgtggagcaagtgggagccaccatgggtatccagacgccgctgatggttattggccggagaggtgtctcggtcatgtctgcctgtctgccgaacccgtagggtctacacacttaaggttcgatgacgctagggttatagggaattgttatacgaggttaccaaaagttgttcagagtcccagatgagatcccggacatcatgaggagtttcggattggtccggaggtgaagattgatatataggatggatgggtttggacaccgaaaatgtttcgggcgtcaccggtagcgtaccgggaccacccggaccaccggaaatggtcccgggggtccactgggaggggccaccagccccaagaggtagcatgggccaaaaggtggtgggcaaccagcccgcgcctccaccaggaggcccaaggcacatgaggtggggagagagggggaaaccctggcgcaggtgggccttaggcccaccaggtggtgcgccaccccctcctgccctggccgccccccctctcccatctggctgccgccaccccctagggagggaaccctagaggtggcgcagccctcccccctcctcctataaatagagaggggtttggggctgttggggacacctttttccctctccgtcggcgcagccctgtccctcttcttcctcctctctgtcggtgcttggcgaaggcctgccgggagacttcgtagctccactgccaccacgccgtcgtgctgccggagctcttccccaacctctccctcctccttgctggttcaaggcgtgggagacgtcactgggctgcacgtgtgttgaacggggaggtgtcgtggttcggcactagatcggaatcacgccgcgattcggatcgcaatgagtacgactccatcaaccgcgttctcgcaatgcttccgctgggcgatcttcaaaggtatgaagatgctctcacctctccctcgttgctggtttctacataggaaggtccttgatggcgtaggaatttttttgattttgctacgttacccaagagtggcatccgagccaaggttttctatgcatagattcgtagcacgagtagaagacaaaggttgtgggcgctgatcttgtcaattgcttaccactactagtcttatttctttccggcggtattgtgggatgaagcggcctggaccgactttacacgtaaccacgtgagactggttccaccgcctaacatgcacatggtgcataaggtggctagcgggtgtctgtctctcccactctagtcggattggatttgatgaaaagggtccttatgaagggtaaatagctttggcatatcaacgttgtggctatcacgtaggtaagaaagcgttcttgctagaaacccaaatcagccaattaaaacttgcaacaacaattagaggacgtctaacttgtttttgcagggtatgacatatgatgtgatatggccaaagttgtgatgttacatatgtgatgtatgagatgatcatgttattgtaataggaatcacaacttgcatgtcgatgagtatgacaaccgggaggagccataggagttgtctaaatttattgtatgagatgcaacgctatgttttcattactttactgcattgctaatagttagctatagtagtagtaatagttggcgtagcaactccatggagacacaatgatggagatcatgatgatggtgatcatggtgtcatgccggcgatggtgatgatcatgcgatgccccgaagatggagatcaatgaagcaaagatgataatggccatatcatatcattgaatgattgcatgtgatgtttatcatgttttacatcttattgcttagaacgacggtagctaataagatgatccctcataaaatttcgagaacgcattcccctaagtgtgcaccgttgcgaaggatcgttgtctcgaagcacctcgtgatgatcggttgtgatagattctaacgttcgaatacaacgggtgtaagccagatctacacacgcagaacacttaggttgactcgacgagcctagcatgtacaggcatggtctcgaatacgagagaccgaaaggtcgaacatgagtcgtatagttgatacgatcagcatggagatgctcaccatcgacgactagtccgtctcacgtgatgatcagacacgggttagtcgacatggatcatgtaacacttagatgactagagggatgtcgatttaagtgggagttcatacttaatttgactagatgaacttaattattatgaacttagtccaaaagttgtctttacaaatattgtagatccaatggccaacgcacctgtcaacctgaacttcaacgcattcctagagaaaactaagctgaaagatgatggtagcaactatgcggactgggtccgcatcttgaagctcatcctcattgcatccaagaaggcttatgtccttgaagagccgctaggtgaccctcctgttcccgcagcttcccaagatgttctgaacgtctggcaagtgcggagtgatgactactctctggtcaagtgtggcatgttatacagcttagaaccggggctccaaaggcgttttgagcaacacggagcatatgagatgttccaagagctgaaactagtttttcaagctcatgcccgggtcgagagatatgaagtctccgacaagttctttagctacaagatggaggagaacagttctgttagtgagcatatactcagaatgtctgggttacatggtcgtctgactcagcttggagtcgaacttccggatgatgctgtaattgacagaatcctccagtctctcccaccaagatacaatggttttgtgctgaattacaacaggcaagggatggagaagaccattcccgagttgtactcgatgctcaaatctgcagaggtagaaatcaagaaagagcatcaagtgttgatggtcaataagaccaccagtttcaagaaaggcaagggtaagaagaacttcaagaaagacggcaaagctattgccgcgcccggtaagccagttgccgggaagaagaagaaaaatggacctgagcctgagactgagtgctactactgcaagggaaccggtcactggaaacggaactgccccaagtacttagcggataagaaggccggcaacgtcaaaggtatatgtgatatacatgttattgatgtgtaccttactagcgctcgtagtagcttctgggtatttgataccgatgctattgctcacatttgcaactcaaagcaggaactgcggaataagcggcggctggctaaggacgaggtgacgatgcgcgtcgggaatggttccaaggtcgatgtgatcgctgtcggcacgctacctctacatctaccttcgggattagttttaaaccttaataattgttatttagtaccagctttgagcatggacattgtatcagggtcttgcttaatgcgagacggctactcatttaagtccgagaataatggttgttctatttatatgagtgatatgttctatggtcatgctccgctggtgaatggtttattcctaatgaatctcgatcgtgatgttacacatattcatagtgtgagtaccaaaagatgcaaagttgataatgatagtcccacatacttgtggcactgccaccttggtcatatcggtgttaaacgcatgaagaagctccatactgattgactattagagtctcttgattttgaatcatttgacacatgcgagtcgtgcctcatgggcaagatgaccaagactccattctcaggagtaatggagcgagcaacccacttattggaaataatacatactgatgtatgcggtccaatgaatgttgaagctcgcggaggctatcgttatgttctcactctcaccgatgatttgagtaggtatggatatatctacttagtgcaacacaagtctgaaacatttgaaaagttcaaagaattttagagtgaggttgagaatcaacgtgccaagaaaataaagtgtctacgatctgatcgtggaggagaatatttgagtcatgagtttggcacacacctaaggaaatgtggaattgtttcacaacttacgccgcctggcacaccgcaacgtaacggagtgtctgaacgtcgtaatcgcactttattagatatggtgcgatctatgatgtctctcaccgacttatcgctatcattttggggatacactttggaaactgcagcattcactttaaatagggcaccgtctaaatccgttgagacaacaccgtatgaattatgggttggcaagaaacctaagctgtcgtttctaaaagtttggagttgcgatgcttatgtgaagaaacttcaaccagaaaagctcgaacccaaagcggagaaatgcgtattcataggataccctaaggaaactattgggtataccttctatattcgatccgaaggtaaaatctttgttgccaagaacggatcctttctagagaaagagtttctctcgaaagaagtaagtgggaggaaagtagaacttgatgaggtagttgtacctcctctcgaaccggagagtagcgcagcacgggaaattgttcctgtggcgcctacaccaactgaagaggaagttaatgatggtgatcatgatacttcagatcaagctgctactgagcctcaaaggtccacaagggtacgctccgcaccagagtggtacggcaaccctgtgatggatatcatgttgttagacaatggtgaacctttgaactatgaagaagcgatggcgggcccggattccaacaaatggcttgaggccatgaaatctgagataggatccatgtatgagaacaaagtatggactttggtagacttgcccgatgatcggcgagccatagagaataaatggatctttaagaagaagactgacgcgaacggtaaagtgaccgtttataaagctcgacttgtcgcaaagggttttcgacaaattcaaggagttgactacgatgagactttctctaccatagcgaagcttaagtcagtctgaatcatgttagcaattgccgcttttcatgattatgaaatttggcaaatggacgtcaaaacagcgttccttaatgggtatcttaaggaagagttgtatatgatgcaaccggaaggttttgtggatcccaagagtgctaacaaggtatgcaagctccagcgctccatttatgggctggggcaagcgtctcggagttggaacattcgctttaatgaggtgattaaagcgtttgggttcatacaggtttatggagaagcctgtgtgtataagaaagtgagtgggagctctgtagcttttctcatactatatgtggatgacatattattgatgggaaatgatatagaattattggagagcataaaggcctacttgaataagagtttttcaatgaaggaccttggagaagctgcatacatattaggcatcaagatctatagagatagatcgagacgcctcataggtctttcacaaagtacataccttgacaagatattgaagaagttcaatatggaaaactcgaagaaggggttcttgccagttttgcaaggtatgagattgagtaagactcagtcgccgaccacgagagcagataaagagaacatgagtactatcccctatgcctcagccgtgggctctctaatgtatgccatgctgtgtaccagacctgacatcaaccttgccataagcttggtaggtcggtaccaaagtgatcccggtatggaacactgggcagcggtcaagaatatccttaagtacctgaaaaggactaaggagatgtttctcgtatatggaggtgacgaagagctcgtcgtaaaaggttacgccgatgctagcttcgacacggatccgatgactctaagtcacagaccggatacgtgtatgttctgaatggtggggcagtgagtaggtgcagcagcaagcaagacatcgtggcagaatctacatgtgaagcggagtacatagctgcttcggaagaggctcatgaagggatctggatgaaggagttcatcaccgaccttggtgttggggaacgcagcatgggaaacaaaaaaattcctacgctcacgaagacctatcatggtgatgatcatctacgagagggagagtggatctacatacccttgtagatcgctaagcgggaagcgttaatgaacgcggttgatgtagtggtacgctcgtgagatccaaatctccgacccacgaacagccccgtgatccgtcccacgaaccgccttgcgatctgtcccgatctagcgccgaatggacggcacctccgcgttcagcacacgtgcagctcgatgacgatctccgccttcttgatccagcaagagagacggggagggtgatgagttcaccggcagcctaacggcgctccggtggtggtggtgttgctattcctgcagggcttcgcctaagctccacagaaacgcgatctagacgagaaacggagaagtagaggtgtccagatctgatttgcacgtggcaaaagttatctcaaatcagccctagacctctagtatatataggaggaagggaggggaggaggcagcctcaaaccctcaaggtttggccgaaattggaggtggaggagtcctactccttcctacttggagtaggattcctcctttccacttggaaaccctttccacctcttccacctttgggtttttgcctctcaaacctcatgggccttagtgggaacttattccagcccactaggggctggtttatctcttcccacagcccatgagaccccttggggcgtgacacccctcccggtggtccccgcacccctcccggcactcccggtacactaccgatgagcccgaaacttttccggtgaccaaaacaggacatcctatatatcaatctttgtttccgaaccattccggaactcctcgtgacatcctggatctcatccgggactccgaacaaaacttcgatttccaccacctataactcaactataccgaaacgtcaccgaaccttaagtgtgcagaccttgcgggttcgagaactatgtagacatgacctgagacacctctcagtcaatatccaatagcgggacctggatgtccatattggatcctacatattctacgataatcttatcggttgaaccactatgccaaggattcatatattcccgtataccattccctttgtcctttggtatgttacttgcccgagattcgattgtcggtatccaataccttatttcaatctcgttaccgacaagtctctttactcgttctgtaatacaagatcccgtgtctaactctttagccacattacttgcaaggcttgtttgtgatgttgcattaccgagtgggccccgagatacctatccgtaacacggagtgacaaatcccagtcttgatccatgccaacaccacagccatcttcggagatacccgtagagcatctttatagtcacccaattacgttgcgacgtttgatacacacaaagaattcctccgatgtcagggagttgcatgatctcatggtcataggaatagatacattgacatgcataaaactgtagcagtaaacttacacgatcatatgctacgttaatagtttggtcttgtccatcacatcattcccctaatgatgtgaccccgttatcaagtgacaacaccttgtccatggtcaggaaaccttaaccatctttgatcaacaagctagtcaactagaggcttactagggatagtgttttgtctatgtacccacacatgtatttgagtttccaatcaatacaattatagcatggataataaacgattatcatgaacaaggaaatataataataacttatttatttttgcctctagggcatatttccaacagtctcccacctgcactagagtcaataatctagttcacatcactatgtgatttcaacgaatctaacacccatacagttctggggttcgatcacgtcctgcttgtgagtgaggttttagtcaactagtctgaactcttcagatccgtgcgtgctttacaaatctctatgttatcctgcaaacgctgcttatacatgccaattggaactattccaactgactactctactatacaaatcctgtttactactcaaagttatccggattagtgtcaaagcttgcataggcgtaaccctttacgacgaactcgttatcacctccataatcgagaaaaattccttagtccactagttactaaggataacttttgaccgctgtcctgtaatcctatcgtggatcactttcgtaccccttgacagattcatggcaaggcacacattaggtgcggtacacaacatagcatactatagagcctatggcttatgcacaggggacgaccttcgtccttactatttcttctgccgtggtcgggcttttgagtcttactcaaattcacaccttacaacacagctaagaactccttcttcgccgattcttttgaactccttcaaaactttgtcaaggcattcatttgattgaaagttttatctagcatcttgatctatcactatagatctcgatgctaaatgttcaagtagctcaatccaggtttttctttgaaaaactcctttcaaataaccctatatgctttacagaaattctacattatttccgatgaacaatatgtcaaccacatatactaatcagaaatactatagtgcccccactcacttatttggaaatacaagtttctcataaacttcgtataaaccaaaaaatctttgatcatctcatcaaagtgcttattccaactccgagatgcttactccagtccttggaaggatcgctggagctcacatacttgttagcatccttaggatcgacaaaaccttctggttgtatcacatacaacctttcctcaagcaaaccgtcgaggaaacaacggttttacatccatctgcaagatgcagcaactgccaacacaattccaacagatttttagcatcactacgagtgagaatctcatcatagtcaactccttgaacttgtcgaaaacatctttgcgacaagtcgagccttttttaatagtgactgtcaccatcattgcctgtcttccttattaatatccatgtgcacttaacagtctcatgaccattaagtagttcttccaaagtcaccactttgttttcatacatggatcctctctcgaatttcatggcctccagccattagtcggaatccaggcccaccattgcttctccatagctcgtaggttcatttgttgtcaaacaacatgacctccgagacagggttaccgtaccactctggagcagtacgtgaccttgtcgacctactaggtttgtagtaacttgatctgaagcttcatgatcactatcatcagctcccacttcaattagtgtaggcgccacaggaacaacttcctgcgccctgctacacactggttgaagcgacggttcaataacctcatcaagtttccactatcctcccactcaattctttcgagacaaaactctttctcgagaaagtacccgtttccagaaacaaacactttgcttccggatctgagataggaggtatacccaactgttttggatactctatgaagatgcatttatccgctttgggttcgagcttatcagactgaaatctttttcacataagcgtcgcagccccaaaccttttaagaaacgacagcttaggtttctctgaaccatagttcagacggtgtcatctcaacggaaatacgtggtgccctatttaaagtgaatgcggttgtctctaatgcataatccccaaaacattacagtggtaattcgataagagacatcacagtatgcaccatatccaatagtgcacggctatgacgttcggacacaccatcgcactatggtgttccaggtggcattagttgtgaaacaattttcacattgtcttaaatcatgaaccaaactcgcaactcagacaatctctacgatcatatcgtagacatttcatcctcttgtcacgacgatcttcaacttcactctgaaattacttgaacctttcaataattcagacttgtgtttcatcaagcaaatatattagtatctactcaaatcatcagtgaagtaagaacataatgatatccactgcgtgcctaagtacttattggactgcatacatcaaaatgtattacttccaacaagtcactatctctttttcatctcaatgaaaacgaggccttcagtcatcttacctatgtggcatgatttgcatgtttcacgtgattcaaagtcaagtgaatccgaacaatccatctatatggagttccttcatgcagttacaccaataggtatggtttgcatgcctcaaatgtttcgaaaacgagtgagcctcaagatccatcagtatggaacttcgtcatgcgttttataccaatatgactcaagtgtcagtgccacaagtaagtggtactatcatcactactttgtatcctttggcatcaatattatgaacatgtgtattactacgatcgagattcaatgagccactcacattggtgcatgaccattgaaggtattattcatccaaacagaataaccttttattctctgacttaaacgaacaaccgtattgcaataaacatgatccaatcatattcatgctcaacgcaaacaccaaataacacttaggttcaacactaatcccgacggtagagggagcgtgcgatgttgatcatatcaaccttggaaacacttccaacacatcgtcacctcacctttagctagtatctgtttattccgcagcttttatctcgagttactaacacttagcaacctgaaccggtatctaataccccggtgctattaggagtactagtaaagtacacatcaaaattatgtatatccaatataccttttgtcgactcagccagccttctcgtctaccaagtaactagggtagttccccctcagtgattgttcccttcataacagaagcacttagtctcgggtttgggttcaaccttgggtttcttcactagagcagcaactggtttgccgtttcatgaagtatcccttcttgcccttgcccttcttgaaaccagtggttctactaaccatcaacacttgatgctccaatttgatttctacttacgtgacgacaaacatcgttaatttctcaaggatcatcatatttatccttgatatattatagttcatcacaaagctgtagtagcttggtgacagtgactttggagaaacatcactatctcatctggaagattaactcccactcgattcaagcaatttgtagcactcagacaatctgagcacctgctcaatgattgagcttcttctcccttactttgtatgcaaagaatcatgttgaaggttttgtatccatcaacacaggcacaagcatgaaatcttaatttcatctcttgaaacatcttatatgtctcgcgacgttcacaacgtcttccgcgccttacttctaagccgtttaagcatcgtgcactgaactatcatgtagtcatcaaaatcgtgtatgttggatgttcgcaacatcaacagacaacgttcaggatttagcacactaagcggtgcatcaaagacacaagctttctatgcagcaatgaggacaatcctcagttcacggaccaagtccgcataattgctactatcgactttcaactaaattttctctaggaacatatctaaaacagtagagctacaacgtatgctacgacataacttgtgaagaccttttgactatgttcatgaagaaattgagtttagcaaattatattactaataactcccactcagaaaatacatccctctggtcatctgagtggtgcatgatccaaattcactagctcaagtccgatcatcacgtgagttgagtttagctacaatggagaacatctccatgttgatcatatccacaatatgattcatgctcgacctttcggtctcctgtgttccgaggccatgtctgtacatgctaggctcgtcaagtttaacccgagtgttccgcgtgtgcaactgttttgcacccgttgtatgtgaacgtagagtctatcacacccgaccatcacgtggtgtctcgaaacgacgaattgtagcaacggtgcacagtcgaggagaacacaattttatcttgaaattttagtgagagatcacctcataatgctaccgccgttactaagcaaaacaaggtgcataaaaggattaacatcacatgcaaatcataagtgacatgatatggacatgaactccgtgcttcacgatctccatcactgaagcaccggcatgatctccatcgtcaccggcgccacaccatgatctccatcatcatgatctccatcattgtgtcaccatcgtggttgtcgtgctatctatgctattactactaatgctaccacctagcaatatagtaaacgcatctgcaagcacaaacgttagtttaaagacaaccatatggctcctgccggttgccatagcatcgacgtgcaagtcgatatttaactattacaacatgacacatctcatacatccaatatatcacatcatgttgttggccatatcacatcacaagcataccctgcaaaaacaagttagacgtcctctaatttgttgttgcttgttttacgtggctgctatgggtatctagtatgatcgcatcttacttacgcataaaaccacaacggtgatgagtaagttgctttttcatcttctccaagatccgcctcattctaatccgattcaactaaagttgaagaaacaggcacccactaagccaccttgatgcaatcatattgcatgttaacggtgaagccagtctctcgtggttatgagtaatgtcggcctgggccacttcgattcaacaatgccgccgaatcaagagaagacaaaggaggatagcacttaaacatcaatgctcacaaacccctttgtgatctactcgagaaaatcatctacgcatgaaccctagctcatgatgccactgttggggaacgcagcatgggaaacaaaaaatttcctatgctcacgaagacctatcatggtgatgatcatctacgagagagagagtggatatacatacccttatagatcgctaagcgggaagcgttaatgaacgcagttgatgtagtggtacgctcgtgagatccaaatctccgactcacaaacagccccgcgatccgtcccacgaaccaccttgcgatccgtcccgatctagcgccgaacggacggcacctccgcgttcagcacacatgcagctcgatgacgatctccgccttcttgatccagcaagagagacagggagggtgatgagttcaccggcagcctaacggcgctccggtggtggtggtgttgctattcctgcagggtttcgcctaagctccgcagaaacgcgatctagacgagaaacggagaagtagaggtgtctagatctgatttgcacgtggcaaaagttgtctcaaatcagccctagacctctagtatatataggaggaagggaggggaggaggcagcctcaaaccctcaaggtttggccgaaattggaggtggaggagtcctactccaatcctacttggagtaggattcctcctttccacttggaaaccctttccagctcttccacctttgggtttttacctctcaaacctcatgggccttagtgggaacttattccatcccactaggggctggtttatctcttcccacagcccatgagaccccttggggcatgacaccccccccggtggtccccggcacccctcccggcactcccggtacactaccgatgagcccgaaacttttccggtgacaaaaacaggacttcctatatatcaatcttcatttctggaccattccggaactcctcgtgacgtcctagatctcatccaggactccgaacaaaacttcaatttccaccacctataactcaactataccgaaacgtcaccgaaccttaagtgtgcagaccttgcgggtccgagaactatgtagacatgacctgagacacctctcagtcaatatccaatagtgggacctggatgtccatattggatcctacatattctacaaataatcttatcggttgaaccactatgccaaggattcatataatcccgtataccattccctttgtcctttggtatgttacttgcccgagattcgatcgtcggtatccaataccttatttcaatctcgttaccggcaagtctctttactcattctgtaatacaagattccgtgtctaactctttagccacattgcttgcaaggcttgtttgtgatgttgcattaccgagtgggccccaagatacctctccgtaacatggagtgacaaatcccagtcttgatccatgccaacacgacagccatcttcggagatacccgtagtgcatctttatagtcacccagttacgttgcgacatttgatacacataaagaattcctccgatgccaaggagttgcatgatctcatggtcataggaatagatacattgacatgcataaaactgtagtagtaaacttacacgatcatatgctacgttaatagtttggtcttgtccatcacatcattcccctaatgatgtgaccccgttatcaagtgacaacaccttgtccatggtcaggaaaccttaaccatctttgatcaacgagctagtcaactagaggcttactagggatagtgttttgtctatgtacccacacatgtatttgagtttccaatcaatacaattatagcatggataataaacgattatcatgaacaaggaaatataataataacttatttattattgcctctagggcatatttccaacacttggagtggttccaagtgcgtcaggtccgatgacactcttctgtgataacactggagccattgccatagccaaggagcccagatttcacaggaagaccaagcacatccagcgccgctacaactccatccaggactaggtccagaggggagtgatagatatttgtaaggtacacacggatctgaatattgcagacccgttgactaaacctcttcctcgagcaaaacatgatcaacaccaccatgctatgggtgttcgattcatcacaatgtaactagattattgactctagtgcaagtgggagactgttggaaatatgctctagatgcaatattaaagtggttattatcatatttccttgttcatgataatcgtctattgttcatgctataattgtattaacaggaaacagtaatacatgtgtgaatgaatagatcacaatgtgtccctagcaagcctctagttggctagctcgttgatcaatagatgatcatggtcatggacattggatgtcatcgataacgggatcacatcattaggagaatgatgtgatcgacaaggcccaatcctgagcatagcggtagatcgtgttgttcgtacgctaaagcttttataatgtcaaagtgtcttttccttcgaccgtgagattgtgcaactcccggataccgtaggagtgctttgggtgtatcaaacgtcacaacgtaactgggtgactataaaggtacactacgggtacctccgaaagtatctgttgggttggtacgaatcgatatcaggatttgtcactctgtgtgacggagaggtatctctgggcccactcgatagaacatcatcacaatgagttcaatgtgactaaggagttagtcacgggatgatgtgctacggaacgagtaaagatacttgctagtaatgagattgaacaaggtatgcaaataccgacgatagaatctcgggcaagttctataccggtagataaagggagtcgtatacgggattgattgaatccttgacatcgtggttcatctgatgagatcatcatggagcaagagggagccaccatgggtatccagaccccgctgatggttattggccggagaggtgtctcggtcatgtctgcctgtctcccgaacccgtagggtctacacacttaaggttcgatgacactagggttatagggaattgttatacaaggttaccaaaagttgttcggagtcccggatgagatcccggacatcacgaggagttccggattggtccggaggtgaatattgatatataggatggatgggtttggacaccggaaatatttcgggcatcaccgatagcgtaccgggaccgctgggaccaccagaaatggtcccgggggtccatcgggaggggccaccagccccaagaggtagcatgggccaaaaggtggtgggcaaccagcccaaagtgggctggtgcgcctccaccaggatgcccaaggcgcatgaggtggggagagagggggaaaccctggcgcaggtgagccttaggcccaccaggtggtgcgccaccccctcctgccctggccgccgcccccccctctcccatctggctgccgccaccccctagggagggaaccctagaggtggcgcagccctccccctcctcctataaatagagaggggtttggggctattggggacacctttttccctctccgtcggtgcagccctgtccctattcttcctcctctccgtcggtgcttgccgaagccctgccgggagaccttgtagctccaccgccaccacgccgtcgtgctgccggagctcttccccaacttctccctcctgcttgctggttcaaggcgtgggagacgtcaccgggctgcacgtgtgttgaacgcggaggtgccgtggttcgacactagatcggaatcacgccgcgatcctgatcgcaacgagtacgactccatcaaccgcgttcttgcaacgcttccgctaggcgatcttcaaaggtatgaagatgctctcacccctccctcgttgctggtttctacataggaaggtccttgatggcgtaggaaattttttgattttgctacgttacctgatgacccacaagtataagggatcaatcgtagtccttttgatacgtaagagtgtcgaacccaacgaggagcagaaggatctgataagcggttttcagcaaggtaataactgcaagcactgaaagtatcggtaacaagtgatggtgtggtgagatgaaacgtagcaagtaacaagtaacaagtaacaatagtagcaacggtgctgcaaagtggcccaatcccttttgtagcaagggacaagcctggacaaagtcttataggaagtaaagcgctcccgaggacacatggaaaatttgtcaagctaattgtcatcatattcatatgattcgcgttcgttactttgatagtttgatatgtgggtggaccgacgcttgggtactgcccttacttggacaagcatcccacttatgattaacccctctcgcaagcatccgcaactacaaaagaagaattaagacaacgtctaaccatagcattaaactagtggatccaaatcagccccttacgaagcaacgcatagactggggtttaagcttctgtcactctagcaacccatcatctacttactacttcccaatgccttcctctaggcccaaatatggtgaagtgttatgtagtcgacgttcacataacaccactagaggaaaagacaacatacaacatatcaaaataccgaacgaataccaaattcacatgactattaatagcaagacttatcccatgtcctcaggaacaaaagtaactactcacaaagcatggatatattcatgaccagagaggtaatgaatatcataatggatctgaatatataatcttccaccaaacaaacgaactagcatcaactacaaagagtaatcaacactactagcaaccttacgggtaccaatcggcgtcgcgagacgacgattggttacaagggatgaactagggtttggagaggagatggtgctgatgaagatgttgatggagatgactcccctccgacgagaggagtgttggcgatgatgatggcgatgatttccccctccgggagggaagtttccccggcaggatcgtcctgccggagctctagattggttctgctcaagttccgcctcgtggcggcggcgcctcctcaaaaaagctccgccctcatttttttccagatgaaacccttcatatagcagaagaggggagccagtgggccaccagggtgcccacaagccccctagctgcggccagggggtaggccgcgtctaccagctcatgggcccctggctgctcccctctggcacttctttggcctagtattttttatatattcccaaaaaaatccacgttgattttcagggtgtttggagttgcgtagaataggggactcagacttgctccttttccagtccagaattccagctgccggtattctccctctttaggtaaaccttgcaaaataagagagaaaaggcataagtatggtaccacaatgtgtaataacaacccatagagcgataaatatcaacatgaaaggatgatgcaaaatggacgtatcagctcccccaagcttagacctcgcttgtcctcaagcgaaaaccaagatcaataaacatgtcctcatgtttagggatagaggtgtcgataaaacacaatacggacatgagggcatcatgatcacacatagaacagcaatacatcatatagactgtcatgcgaaagtgacaattccttcacaaagtaaagtataaatcaaaaaccttaccgagaagtgacaaacaatagtccatagtcaatgaagcaattgcaagttatcataacatcggaaagagtcaaataggagcttgtaaagcaaatccacatactcaatcatctttttgttttctacaattgttacaactcacgtggtactcatgggatcaaagtttcagtcggacacagagaaagattggggcttatagttttgcctcccaaccatttacctcaagggtaaagtcaacaataataattcatgagtacttatctccaaattgacatatgaatatagatctttccctagcatatgacgttcaccaagatgaaggcggaataaggaattggtgttgatcaccatgactctcacaagaacaaaagtaaaagtacaagataggcccttcgcagagggaagtagaggttgtcatgcgcttttgaggtttggatatacgacctcttagtgtaaaggaacgtcactttacattgcctcctgtgataaataactttattatgcagtctgtcgcttttatgtcttcctcatcacaggttcgtacaaagcttattttccacacactaataggttatacatattttagggagcaactttttattgcttgcaccgatgacaacttacttgaaggatcttactcaatccataggtaggtatggtggatctcatggcaaaactgggttgaaggtttatggatgcacaagtagtattcctacttagtgtggaagttttggctaatatgaggtggaagcaatcgtcacatgctatgggatctctagtcatataacattgtttggaaccaagcaaacacaattcattatctacttctaagcatgtaatagtttggtgagtgctcacaattatagataatgtctaagatgatatatttatatgtgaaccactccttccttattacttcttattaattgcaacaatgactagggtctatgttggtctattctcaacaagtttcaatcatcatacttgtcatatgtgaagctaccactttccataagatcatctcatgatctttcatgcttttgttcttttctcatacttttgatcacggaacgaagcaaagcccttgactaagatactcattattatatggctcacaagctcgaatacaacgggggagacacaaagaaaaagactcaaactaaacactaaagacttattccactagagaagaaataaaactgaaaagggaagaactaaaacaaaggtaaaagcgaaagatatgatggtgatacgataccagcacagctcccccaagcttggcacaagccaagggaattgcccataccaatgcttagttgtcttcctttggtggtgatggtggtggaattgtcttggcctttgattccaagagagctatcaatctttgatttataccttggagatctgcgatatgattctccagcaaaaaaacttcacgagtgagggaaatattgcgagcacgagttgtttcacaaaacctcaagagttcaatcaaggatggagacagcaggtggaggtagggttagagaaaatccactccttcaacgtcttcattgttgaacataggttgaacttcatccctaggctggttcttctccttaactttgtccctggcttccgtgacttctactcttttcagatcagcatctacttcttcatggacttgagggggattattctccccaacagattcctgagacatctttgctctaaatctgcggcagaaaacaggctcgaaatgaaaacagaggaaatctgctcgatgcggagatcaaaaccctcgggcgtatatataatgatttttttcagaccagaaggagtacttgatacgtctccatcgtatctacttttccaaactcttttgcccttgttttggactctaatttgcatgatttgaatggaactaacccgaactgacgctgttttcagcagaattgccatggtgttgtttttgtgcagaaataaaagttctcggaacgtcctgaaaatttacggagaatatttctggaatatatgaaaaatacctgcgcaaagatccaccggaggggacgggccagtgggccacaagccctgtagccgcggcctcccccctggccatggctaccaggcttgtggggcccacgtggctctgctgcccccaattccagcgctatttattccctttcgtcccggaaaaaatcaggagagaagagttcatcgcgtttcacgatccagaggcgccgccacatcccgttcttgccctggagggcagatccggagtccattttgggctccggatcaaggagatcgtcgccatcgtcatcatcaaccttcttccctctccaattccatgaagctcttcatcgtttgtgagtaatctattcataggctcgctgggcggtgatgagtaggatgagatctatcatgtaatcgagttagttttgacggggattgatccctagtatgcactatgttctgagattgatgttgctactactttgccatgcttaatgattgtcactagggcccgagtgccatgaattcagatctaaaattattatgttgtcaccaatatatgtgtgttttagatccgatcttgcaagttgtagttacctactatgtgttatgtccggcaaccccggagtgacaataaccggaaccactcccggtgatgaccatagtttgaggagttcatgtgttcaccaagtgctaatacgttggtccggttctttattaaaaggagaaccttaatatcccgtagtatccatttggaccccgctgccacgggagggatggacaatagatttcatgcaagttcttttccctaagcacgtatgactacacacggaatgcatgcctacatcacattggcgaacgggagctagccacatatctctccgtgttataactgttgcatgatgaatgtcatccgacaaatcaccgatccattgcctacgagtttgtcccgctgctattgttacttgctctgccgttactattgttgctgctactgttactcgctgctattgttacttgctctgccgttactactgtttctactgttgttacttgctttgctctgctactgctactgctgttacttgctactgctgctacttgctactgctgttattattgctgttccttgctactactgttactcgttactctgctactacctgctacaatacttatctggcaccattgatacttcagttaggaataatctgccgtcaatagattctttcctagcaccgttgctatcatactactttgctgcttataccctgcttgcagatactaatctttcaggtgtggttgagctgacaactcaactgctaatactggagaatatcctttcacttccatcgtgtcgaaccaacaaatttgggttgaatactctaccctcgaaaactgtcgcaatcccacacgctggtgggccattgcaagacaattgctaattgttgagcaacaggaagcagctcttttctggcgccgttgccggggagggatagctatattctctgagttgctttagatttatatctgctgatcactatgaagaatctgagagatccaagaaccaaagtcttgccctcaactacgaggggaggtaaggaactgccatctagctctgcacttgattcaccttcagttatgagtaagtttgcgacaccacctcctgctagaaatcttgatatgtcgcctatgctagatgatgctagagatgctactgctattgatgatgcttatgatgctactatgcttgatgatactatgcctgatactgctagagatgctatgtctgatactgctagagatgctatgcctgatactgccttgcctagtgatgctagagatgctattttgcctgatgatgctatgcttgatactgctagagatactactttgcctgatatgccactaggggtattccttgatgctcatattgctagagttactgccaatgctcgtgatgcttctgaaactgcccatactattgagatagaacctgcttttgctcctgctagatctagctctcctagatatgaattgcctgatatacctgagggttaagttatggagggagagatagttgaggattttcttgcgtgtaaggatgcctatgatgctgagaaattacttctcaagtggaaggaaaaatctctgaacgctaggatgaaatatgacccgaagtttgccacttcacctatctttatcaccaatgaggattatgaattctctgtcgaccctgagataatctctctagtcgaatctgatcctttccacggttatgagtctgagacggtcatagcccatcttaccaaactacacgatatagccacccttttcactagtgaggagaagatccactactactatatccttaagctgtttcctttctctctaaaggatgacgctaaagcctggttcacttctcttgctcctggatgtgtgagtagtccccaggatatggtatattacttctgtgagaaatatttccctgcccataagaagcaagctgccttgcaggaaatatacaactttgctcaactcaaagaagagagtctcccacaagcttgggggaggctcatccagctacagaatgctttgcctgatcaccctcttaagaagaatgagatacttgatatcttctataacggacttaccgttgcttctagagaccacctagatagttgtgccggttgtgtttttagggaacgaactatagaacaagctgagattctactgaataacatcttgatcaacgataatgcttggactattcccgaacctcctcctaagccaactcctaagaaaagaggtattctattccttagtcccgaagatatgcaagaagccaagaaatctatgcaacaaaaaggcattagatctgaagaagtcaaaaatctaccgcctatcgaagagatccatggtctcgataacccgatacaagtagtagaagtgaattctctgcgtagattcaatgagagtgatatttcttttgacaaacctgccagcctatgcttcaatgaatttgacaactttgttgccaaacaacagagtttcattgattatgttagcagacaattggaacaaagtactcttatgcttagtcatttaagtgtttgtgtagacagaaatgtcaatgatctgaagcttctgagtaaacatgcctctatgattactactcaggtagaacaagtacttaaagctcagaatgacttgctcaacgaattaaatgacaactctgtcagagtcattaatagaggcaaaatgactcaggaacttttgtatcctgaaggtcatcctaagagaattgatcaagattctcaaggaattaatgctgatacacccagtcatcctaagaagaagaagaaggatgatagaaacctacaagctagttcaccaaatactgtcacacctgaagaaccaaatgatatttctgcgtttgatgcagaaacacaatctggtgatgaacatgaacctggtgacaatatggacagcgatgttcataatgatgctcgacctaccaatgataaggatgtggagattgaacctacggttaatcctgataacccacaacctaagaaatatgataagaatgacttcactgctaggaagcatggtaaagaaagggagccatgggttcagagacctatgccctttcctcctaagccatccaagaaaaaggatgatgaggattttgagcgctttactgaaatgttgagacccgtctttttgcagatgcggttaattgatatgctcaaaatgtctccatatgccaagtacatgaaagatatcgtgactaataaacggaagataccatatcttgagatctctaccatgctcgccaattacactttcaaaggtggaactcctaagaaacttggtgatcccggagtgcccactataccttgctccattaaaggaaactacgtaagaactgccttatgtgaccttggagccggtgttagtgttatgcctctctctctttatcgtagacttgaactggataagttgacacccactgaaatctctctgcaaatggccgacaaatcaactgctttccctgtcggcatttgcgaggatgtgcctattgtggttgctaacgttactatcttgacggactttgttatcctggatattcctgaggatgatgccatggcgatcattcttggaagaccgttcttaaacaccgcaagggctgttatagattgcagcaaaggcaatgtcaccttccatgtcaacggtaatgagcatacagtgcactttccgaagaaacgatatcaagtacattgcatcaatgctatcgaaaaaacttcatcgattcttattgggagctttgaatgccctatacctcgtgttaagatgaagtatgatttgcttgttggggagattcatgtccccattgaggtgacttagtggctatccgacaattctgcgtttccttttgcgatttgaaagagtttcgtcatggggatttgatcaaccccatcgacggatttctttcgatgaccatgaaatggatgaatcaaggagtcacatacctctgttttaagatttcactttatgttgtttagaaggaaaatgatagatttagtttagtttttcctgttttctgttttagtgtcccggagaaaagtaccccgaaaataaaagttctccgatggtcctgaaaatcaaatatgattttttctggaatttttgtaaaatactgggactgagagctggcctgggggccacaccagtgggccacaagccctatagccgcggcctcccccctggccacggctaccaagcttgtggggcccacaggcaccccctccactcattccagcacccatcctcttctcctacctccagaaaaaatcgtttcgtagctcaaacccgtgttcttgctcatttggctgtgattttcgatatccttgctcaaagcaccattctccgaaccgttttggggaaattgctccttggtaagtgactcctccattggtccaattagtttttgctctagtgctttatccttcgcttattcttgctaccttggtgaccctgttcttgagcttgaaatgttgattttagctggtcccaagtaattttaacgtgtgatacggtctctaggcactagtaggagtagttgctacaaggtgtggttggtctttattcacttttctcttgaacctcaaaaatttcagcaaaataaattatgttcaggagaaagtttcatggtggttcctcaagtaagaagggtccccgtctttctattcgggagcccgatccttatcaactaagggacgcaccggtacaaccatgtgaatggccttccgatgagttcatgatcgaagcaggcttcaaggatgagtttgatacacttgtccgcaatgccgggttagaagaattcctctcggataagtgtgaacagtatgctatgctcactgcctctttcgtgcgtagatttaaatttttagttggacgtgactcatccatactgtttgatctgtatgataaatcctacaccatggatttagaggatttcaataggatttgcaagatacccgataggggtagtcttaatgatcctgctaagtcttcggttagagattttgtctctagtataactgttggagaaaccagagacatcacgcaagctaccataggaagcattcatttccctgccttgcactactttgtcctcttcataggtagatgcattaacggtaaggttgaacattgtcacctatgcgcattcgaccttagtatccttaagagcgtagtaacaggtgacagaagcttcaacatgggagctataatagcaaggaggctgaataataatgccatcgatggggatttctttggtgggatttatgctacgcgcttagcaaattttcttggagtacccatccgctcaggaggtccccctcttcgtacaacctaccttgatcgtgtcgctctcacacgctatcagtttctcaagagggatgaggaatccctcgtttaccggttagtgtttaaccggcagcgtgcttttcatattacgcttcctgctcctgccttctttgactttcaggtgaaacgaagatattatataaccataggagaagcagaggagtatgagagggaggctgagacttctcgtctccgtgaagcagctattcatgcagtggctgcagcgctcccgtacaacccacactatgattttgggtatcacccagaccatccttgggagtagaccaagctaggccaaaagcctaagcttgggggagtacgtgtttgcactaactttacatccatgcttatgctttgaatttgttagtcggtgtttacactttgccactgtattatccatgctagtttattttcgttttcttgttttcttgttttgtgtccttttcagaaaacccaaaaagattttcctttcttcttttgcttgttgggagctttcccgtgtaaatagttttctttttctttgggtcaaggtagaagaccatgattacaatgtgtagtggctctcgcatgcatatctgtttatttgttaaagagccatattactttgtctcctcctttgtgtttgcctgcagattcagcttagtccaatgcacgagcactcttattattgttcacattgttcgatcatgcaagggaaaggtaataatgatgatatatgatgaagtgactgagactgaaaaagctggtatgaactcgatctattttgtttttgtaaatatgactggcttgtcgttccagattcagctttgttgtgagagaaccatgtttgcaatgacaacttagagatcatagtttctgatgccatgcttaattagctaggagcttataatggtttgtcttgaatgccaacatagattttgagatgactatgatgtagtatgataggatggtattctcctttgaatgattcaagtggcttgacttggcgcatgttcatgcatgtagttgaaacaaaatcaacatagcctctatgatattcatgttcatggtgatttatatcctgctcatgcttgcacccaatgttagtcaaactcattgcatcttgatgactgttgtcactctctagttggtcgcttcccaatcttttgctagccttcacttgtaataagcggaatactgcttgtgcatccactttcataaatccaaaagtttttccatgagagtccaccatacctacctatttgcggtatctacctgccgttccaagtaaatttgcatgtgccattctctaaaccttcaagaaataatctgttttgcatgcctgaaccgctcatgtggtaacagagggctatcggtatcttccatgctaggtgtgttatcctcgacatgtgtttatgcactgtcactcatgagaaaggggccggtaattggaatgcccagttccacgcttaaatcgaaaacataactgtaaaacaagactccccccggattgatgttagtatggacggtacccgaggattcggctagccgtggagtgtgattgattggtggtgggggagttaaaactttacttttctgtttgggaaccgcctatagcatgagtagcatggaagatattgaaaactcttggtcattgcattgacaatgaaagcatgccacccaaaattattatctctgttttcacagcttgaaatctggcacctctgcaaatcaatgcttcccactgcgaagggcctgtctatttattttcctgttaagtcatcctcttcttataaaagcaccaattagagagcacccctgtcatttttatgctttgcttttgactggtattgagtatgactatgactggatcttcgttgctatgaattacaatgtttagtcatcccttgatctttgaaagtgctctgcatttatgttttgcggtctcagaaagagctagcgagataccacctattcatattgcttcatgcttgttttgattgaaagggctagttgtctaacagctagcaagcaaagatcatggtgcttaatatgaagcacaagtgtggaaatgagatagtagcattgtcccttctctctttttctctcatttttttggtgggctctttggcctcttttttaaaaaaaaattaatttttttctttcggtgggcatctttgacctctttttgtaaatgggcttcgctggcctcttttatttcctcacatgggacaatgctctaccaatgatgatcatcacatttacaactcaaaacttagagcaatgatgactctatatgaaatgccttcggtagtgtaccgtgacaatgatctagcatggcatagacatttaatggaaacatcgtgctagctatcttatgatcatgcaatggcaatgtagaagtggtggcacatgtcatggtggtagttgcatggcaatatatctcagaatggctattcaaaatgccatagtaggtaggtatggtggctgttttgagggaggctatatggtggtttatgtaccggcgaaagttgcacggcactaaagaagatagtaatggtggaaggtgaaaatgcatataaaccatggactcaacattagtcatgaagaactcatatacttgttgcaagaagtttattagtaatcgaaacaaagcattcaacgcatactcctaggggaagggttgataggtataaaccatcgcgcgatcccgaccgccactcaaaggatgacaatcaataaactaatcatgcttagacttcatcacatagcggttcaccatacatgcatgctacgggaatcactaacttcaacacaagtatttctagatccacaacaccctactaacataactttaatattaccacaaccacaactcaaaactatttgcaaggaatcaaacttctctaactactcaatgcacatgaaagtggaagtttttgtatccctttggataactacctcttttgagactactttcaaagcatagatcaactgccaaaccatgcaccgccatgctctaaagatataagtgaagcacatagagcaaaatcaactagctcaaaagatataagtgaagcacatgtgagctgaattgcctaacacaaaagatataagtgaagctcgacaaaatcacggtgagtgcatgtctctctctctaggtgtgcagcaaggttgattgttacacaaaaaaataaaagactcctaagatacaagacactccaagcaaaacacatatcgtgtggtgaataaaaatatagccccaagtaacgttaccgatggattgaagacgaaagaggggatgccttcccggggcatccccaagcttaggctttttgacatccttgaatcatcttggggtgccttgggcatccccaagcttgagttcttgccactctttatctttttgtccataagaacttcacccaaaacttgaaaacttcacaacacgaaacttaaacagaaactcgtgatatcattagtataagaaagcaaattaccacttccttaggtactgcagcaaacttaaattctacttatgctggtgttgggttactatattttcaatcttccatggctactaccccccgatactatccatagtttcatcaaaataagcaaccaactcaacaaaaacagaatctgttaacagcagaccagtctgtagcaatctgtaaggttcgaatgcttctgttacttcaaaaattctgactaattacgaaggcctgaagaattttcttagaaatcagaataaaaaagaatcaactcaaaatctctcacagaaaaaaaatgaaaattcttttcgtgagcagaaattttctgtcttttccagcatgatcaaacgatcatccccaagactaatcataactgttttatttggcacaaacgctaaaaggaaacacaaaaaacaaaatcataacataattattaaagtgtggaaaacacaaaacataaagaaaaaggatagattcgttgggttgcctcccaacaagcgctattgtttaatgcccttagctaggcataaggtgatggaatcacgtatagtcatctttggtgctcaaaccataagtagccctcatcatagattcataaggcattcttattttctttctaggaaaatgctccatgcccttctttagaggaaattgaaatctaatatttccttccttcatatcgatgatagcaccaatagtccttaggaaaggtctaccaagaatgatggggcatgaaggattgcaatctatgtcaagtacaatgaaatccacgggtacatagttcttatttgtaacaataagaacatcattgatccttcccatgggtttcttgacagtagaatccgcaagatgcaaattaagagaacactcttcaatctcatgaaaaccaagaatatcacataaagactttggaatcgcagaaacactagcacccaaatcacataaagcattgcattcatagtttttgattttgattttgatggtaggttcccactcatcataaagctttctaggtatagagacttctaattcgagtttctcttcaagagatttcatcatcgcatctatgatatgtgcggtaaaagctttgctttggctataagcgtgtggggagtttgcaatggattgcatcaaggaaatacattcaaacaaggagcaactatcataattgaatcccttgaaatccaaagtggtagtttcattactacccatggttttgatttcttctactccactctccacacctgtgtcatcaagataggtggactccgaatcgttggggcatttttcaaccaaagtggattcacatccagccccttcatcaataggtttgacacgcgaaaacaaagattcaagaggagtcacaccaagcactttaagatcttcgtgatttgcatcacgagaacgcgcccttttaaaccattcatgcttagcacgtatttgggcggttctttctttgctctcattcatggaaacacgcatagcttttaaagtttcatccaagttgatcttgggaggagcacatctaactttcaaagcatcaatatcacaagacatcctatcaacgctcttagccaaattgtctatttttagtaatttttcctctatggacgcattgaaaaccttttgagagttgatgaactcttcgatattactctctaattcaaagggtaatttgttgtggtttccataagtattgttgtaggagttgccatagttattagaggagttactaggaaaaggcctaggaacatagtttcctctaaaagcattgttgttgccaaaaaatttcctaccaacaaaattaacgtccaagctagcgttgctactctcaatcaaagaagatagtggcatgtcattaggatctacgggagtatttgtactagcaaccaaattcattaactcgtccagcttagcaccaagcgagttaatttcttctatagcgtgtacctttttgctagcaggtgacctttcagtgtgccactgagagtagttggtcatgatattgtctaggagttttgtagcatctcctaacgtgatttccatgaacgttccacctgaggcggagtccaagatattgcgagaagcaaaattcaaaccagcgtaaaagatttgtataatcatccacaaactcaagccatgagcgggacaattcctaatcattaatttcatcctctcccaagattgtgcaatgtgttcatgatcaagttgcttgaaattcatgatatcgttacggagagagataatcttagccggcggaaaatacttggatatgtaagcatctttgcacttattccaagaatcaatactatttttaggcaaagaagaaaaccaagtttttgcacgatctcgtagagagaacggaaaaagcttcaacttaacaacatcattatccacatctttcttcttttgcatatcgcaaagttcaatgaaagtattaagatgggatgcggcttcttcactaggaaggccagaaaattgctctttcataacaagattcagcaaggcagcgttgatttcataagattccgcactagtggcgggagcaatcggagtgctaataaaatcattattattagtactcgagaagtcgcaaagtttgatgttttcagccatgatgacttcaacaagcaaacaagaacacaagcaagcaagaaaaacgggcaaaagaaaacggcaaatggaaacggcaaaagagaaaggcaaatggaaatggcaaatgtgaagtgggggagaggaaaaagagaggcagctggcaaataaaagtaaatgcaagagatgtgttcgtgacacttacttggatagatcttgacttgatctcccccggcgtcagaaatcctccccggcaacgacgccagaaatccttctgctgctggctacgcctatagggatttccttggcaagtatgcaaaggattcccccgcggccttggagccttgcgttggtgttcccttgaagaggaaagggtgatgtagcacagcggcggtaagtatttccctcagtttgagaaccaaggtatcaatccagtaggaggatcgcgctgggtcacaagtacctgcacaaacacagagagcttgcacccaacgctatgaaggggttgtcaatcccttatagattgtttgcaaagtgagaactgaaagcaaaaagtaaataaagcaaagtaaaagtaaaagctgggatgataattgtgagtagacccgggggccgtagtgttcactagaggcttctctcatgaaagcaagtagacggtgggtgaacgaattactgtcgagcaattgatagaaccgcgcaaagtcatgacattatctatggaaatgatcatacatataggcatcacgtccaaaacaagtagaccgatactttctgcatccactactattactccacacgtcgaccgctatccagcatgcatctagtgtattgagttcaaaagaacagagtaacgctttaagcaagatgacatgatgtagatgaacaacctcataatgatgacaaagttcatcttgttacccttgatggcaacaacacgatgcgtgccttgctgccccttttgtcactgggaaaggtcaccacacggtatgaacccaaaaccaagcacttctcccattgcaagaatcatagatctagttggacaaacaaaacccaagactcggagagacttacaaggatatcaaatcatgcatataagaaatcaacaaagactcaaatataattcatagataatctgatcataaatccacaattcatcggatctcgacaaacacaccgccaaagaagattacatcggatagatctccatgaagatcatggagaactttgtattgaagatccaagagagagaacaagccatctagctactaactacggacccgtaggtctgaagtagaccactcacgagtcattggagaggcaatgttgttgatgtagaagccctccagctccaaagtcccctccggcagggcaccgggaagggtctccagatgagatctcgcggaaaatggaggcttgcggcagccgaaaagtggtttcgtggatgccctgattttttttcaggattttagggaatatataggccgaagggctaggtcagacggccgccagggaggccacaagcctggacggtgcggcctcccccctggccgcgccatcagggcttgtgggccccctgtggctcctcttggttggccctcaagtcccccgatcttcttctgtttaggaaaaaaatcatttcggggattttattccgtttggactccgttccaaaatcagatctgaaaagggtcaaaaacacggaaaaaacaggaactggcacttggcactgaattaataagttagtccccaaaaagatataaaaggtatataaaacatccaaagttaacaagataacagcatgaaaccatcaaaaattatagatacgtttgagacgtatcaatcttcatggagatctatccgatgtaatcctctttggcggtgtgtttgtcgagattcgatgaattgtggatttatgatcagattatctatgagtattatttgagtctttgctgatttcttatatgcatgatttcatatccttgtaattctctttgagttgtgggttttgtttggccaactagatctatgattcttgcaatgggaaaagtgcttggttttgggttcataccgtgcaatgacctcacccaatgacagaaggggtagcgaggcacgcatcgggttgttgccatcaagggtaaaaagatggggttttaatcattggtttaagtttatccctctacatcatgtcatcttgcttaaggcgttactctgttcgtcatgaactcaatacactagatgcatgctggatagcggtcgatgtgtggagtaatagtagtagatgcagaaagtatcggtctacttgtctcggacgtgatgcctatatgtatgatcattgccttagatatcgtcatgactttgcgcggttctatcaattgctcgacagtaatttgttcacacaccatttacttgctatcttgagagaagcctctagtgaacactatggcccccgggtctattcatcatcataatttcagctttacacttttactttgctttgcttttttgctttcagttctcactttgcaaacaatctagaagggattgacaacccctttttagcgttgggtgcaagctctttgtgtttgtgcaggtactttggacttgacgcgatcctcctactagattgataccttggttctcaaactgagggaaatacttactgcaactgtgctacatcaccctttcctcttcaagggaacgccaacgcaagctcagaaggccgcggggatatcctttgcatatttgccaaggaagtctctataggcatagccagcagcagtcatcatatgacttattatcgtcagtacatttggtacaactgactaattgacctccttacatgcaagtatcactcctacactgatgactacccatacacatgttaagcacgtgatcatctaaatgacgagatttgagtgaaggatttggaaaaaacctcgagcaccttcactcatacattatggtacaccttgttgtctatatccagattatatattggagaaatttattgtgtacaagtcttatccatccataattcccatggttgttcgttctctagacgttgagaaagattcatttagaccatgagattgaaataagatgttgggaccgaaagttccatatcctagtgccattggacccaccaaacatagttggttgggactcaagaatatcgtgtgatatctccaaggaatcgaacatcttgtcttaatcttttaagtttcatagaaatctggacaccaatatctttagatacatcgaccagatccttactatgtgagatcgtagacaagatttgtgttcatactaggtgtagtagccatcccatcaaagtcttcaaaacatacctcactccaaaactccgtcctcaattcggattgcaggcagcaacgctacatccaacaaccattataagataatgttgcttgtgttgtacggatacaaacagattacatagtacacaatatcactctattgctcatcttgcaagtcaaatcatgtgacaatgtgatacgtctccaacgtatcgataatttatgaagtattcatgccaagttttcctatatttagaataattttatacggttttgatgcattgtgtttgatttatttagaactaacccggactcatgccgtttttagcagaattaccacggtgttttttgtgtgcagaaaatgaaagttctcggaatcacctgaaagttttatatttttttatagaggaaataagcaatattggagtgaagaaccatcataggggagccacctatgggccacaagccaatagggcgcgaccccctaggtcacgccctgatagtttatggggccaacatggctccgtttggcgtgattccaacactgataaatcccatatataccagaaaccccagaagtaaaaaagagaacttcctctccgctgccgcaactctctgtattgatgaaaaaccagtatggatacgttcgagtaccctgacggagaggggaaatcatctccgatggccatcttcgtcatcccgatggaggccatgacgaggagggagtagttcatcctcggggccgaggttttgtacgagtagctatgtgtttaatctctctctctctctctctctctctctctctctctctctctcgtgttcttgagatgtcatgatcttcatatctcacgtgctttgttaatatagttggatcatatggtgtttgtcccttgctatttttgtgttgaattgaatctttcactttaagatctccttatgttagattgaatatttaggtttgagaatacttgatgtatatcttgcatgcagatacccgtagtgacattggggtattcaagtgattcacttggtatatgttatggcatcaacttgcggattccgatgaccttggggatctatgcataggggttgattgcatgttttcatacgatgttctctcatagaaatctttgggtgctccttgaagttctttgtgttggatcgaatatgatagatctgaatttttttgatgcatgtcgcataatttatccatagatacttgaggtgatattggagtatctaggtgacattaggcttgattgatatgtatcatgggtgttattctagtacgaacactagggctgtttgtaacacttataggaatagctcaaaagattgattagaaaaataactttgaggtggttctactacctgcaccaatttcatcttattgttctccgctagataggaactttggagtgattttttgttacacattgagggatgatcatatgattctattatgttagcattgttgagagattgcactagtgcaagtatgaaccgtaggacttattaccaagcatttatacaatgttttgcttgctgttttacacttactaccttgctgtttttatattttcagattacaaaaatctatatctactatccatactacacttgtatcaccatctcttcgccgaactagtgcacccataaaatttgccattgtattgggtgtgttggggacacaagagattttttgtttgattgtagggttgtttgggagagaccgtcttcatcctacgccttccacggttcgataaaccttaggtcatccacttgagggaaaattgctactgtcctacaaaactctgcgtttggaggcccaacatagtctacaagaataaagttgtgtagtagacatcacaacctcgttgatttttttatgaagtctctaccaatttcaacattccataattaaacatgttgatggaatgggtatttgacggcttcaagatatgcaagtaccagggggagtatcttcctaagttacttctgttcaaaccatcatattatactctttttcctttatgagtgtacttttataggttctcatcaaggtttttaatgaggtaatatcaacatgagatcataggtcataccttttgttttccccaccgacatttttttgaaagtatacactgcatatttattgtcctataaactctatacgttttctcatattgagttaaaagagacaattattatgatatgccatatcgttttgttcttatatttttcccactgggttttaaaagagttttcagtggcatatcagatcccactctttttcttttgatatttctcttgaaatttctcatgaaaggtttttaacgaggtgacatatgcaatactttctatttttcctcacggtttttaaagaaaattatacatacattgtgtaaaaatcaatagctaatcatatgacttattattgtcagtacatttggtacaaccgactaaatgacttccttaaatggaaggatcacccctacactgatgattttccatacatgttaagcatgtgatcatctaaactgacgggatttgagatgaaggatttgggaaaaacctcgagcaccttcactcatacattatggtacaccatgttgtctatatccagattatatattggagaaattgattgtggaaaagtcttgtccatcaagaattcccatggttgttcgttctctagacttagagaaagattcctctagaccatgagaatgaaataagatgttgggacctaaagttccatatcctagtgccattggacataccaaacataactggttgggactcaagaatatcgtttcatatctccacggcatcgaacctcttgtcctaatattttaattttcatagagatctggacaccaatatcattagatacatcgattagatccttactatgtcagatcgtagacaagctttatgttcatactaggtgtggtagccatcccatcaaagtcttcgaaacaaaccttattgaatacatccagcgaccattatctccaagataatgttgcttgtgctgtatggatgcaaacatattacatagtacacaatatcactgtattgctcattttgcaagtcaaatcatgtgacaacctcattgatttgtttattaagtctccaccaatttaaacaatccataaacaagttcatgtaatgggtattcgacggcttaaagatatgcaagtatcagggggagtattttcctgaattagtcctatttgaagcgtcatattatactctttttcctttgtgattttacttttacaggttctcatcaaggtttttaatgaggtaatatcaacatgagatcatatgtcataccttttgttttccccaccggtgttttttgaaaagtatacacgacttatttattgtcctttaaactctatgcattttctcatattgagttaatagagacaattattatgagatgtcatatcattttcttcttatatttctcccactgggtttaaaaggagtttttagtggcatttcagatcacactctttttcttttgagatttctcttgaaatttctcaagataggtttttaacgaggtgacatatgcaatactttctatttttctcacagttttttaaagaaaagtatacaaagcatatttattgttctccaaactcataaatgagttttctccttcttcaaaggtatttctcatatgacttatcaaggagacagcaataataatatgttgcatcattttctccttattatttttcccaccgggttcaaaggagttttagcaacatatctattgtattctcctcatattttcccacggggttttggggagtgactattaagattatatgaaagatttctcaagatggaagatctatatacaagaagctttcaacgatgaaacattgaagaagcggtgttgtacaagggagagtgttataaataaattagcacatgtccattgttaattagcacatgctaattaacgatccatccttagcaacaggtgtgtccaactccaaagagtcatgttccttcccgctttctattgttaaaaggaacctattctgtagggatgtctccgaacatgcatcccttcttcatatctatttcagatgtatacatacttgagaatcaatagaaaccaggattaatcattcattcactttcaatctcgttttactttaacagatcgtaagaaaatggtagcactacttgcaaaaaatgagagaggtgacagcaccttgctgcttcctcccaccaattaatcttgtcatcccctaggagagtgtctccacaagcaaagcacgccacccgttgaaagaaaaaagaacacggcacccgttgtgcaaagctgatgagcacaatcaacgtcatcgttttaattttgtcgtcggaaattcattaataaatagtggcattaggttttctagtgcaccaaatattattcatatccatgcattcttatcccttcaatcaaacaccgcgaggaaacagtcttacaaattagcagcgacattgtcattgtagagtgtagatcaatcaccattcttaaaaattagctggaaataaccacttgctccaccatatacgcaaggaggtgcgtggtgccaaagttgattaatccaaccaacgtggctgcttgtgcctagacaatgcaaactgagctgtttataataactaaacttatcgcaagtgttgagacgaccatacgcttatcctaacgtgtccgcaaagtcagcacaccgagattggcgccggattgtaatctgactctggcacgacagtccaagcgcggcacctctaggcctttttggccgttcacaacatcgaacatgattgatgattccttgctagggcagctatactaacatagttagctactaatacagccactgataatgggacccaggcacccaaccctgctgagtgaggcccacaaggcagtgagcctgtgcacatgagttgctcgtggttgataaattaagatcatgcgctatacagagctccactattatttaggacagcaaaacgagcattacctcagtgccttctttgcaaccgtagagcgctaccagctacctaccacccaaacacgttcccaacagcgtatagctagagagttcgagcttgccatggagatcgccgtgggggctatcggccctctcctcccaaagctcggtgctctccttgttggtgagttcaccttggcgaaacacgtgagaaaaggcatcgagtcacttgtgacagagctcacgctgatgcatgccgccctccaaaaggtggggaaagtgccgccggatcagctcgacgagggggccaagatatgggcaggaaatgtgaaggagttgtcctatcagatggaggacatcgttgatgctttcatggtgcgtgtggaggatgggggtgagcccgccagcccaagaagtagagtcaagaagatactcaagaagaccatcaaattgttcaaaaagggtaaggatctccgttgcatctctaatgctctagaagaagcggttcatcaagctaagcagttggccgagctacgtcaaaggtacgaccaagagatgcgggatgctagcgttgtttctagtgttgaccctcgcatgatggccttgtacaaggatgtgatagagctcgtcggcattgaagaaacacgagacgagttgattaacatgttgattgaaggcgatgattggttgaaacatccgttgaaaacagtctctattgttggatttggtggtttaggaaagacaactctagccaaagcagtatatgacaagatcaaagggcaattcgactgtggtgcttttatctcggtttctcataatcctgacatgaagaaagttttcaagaatattctctgtgaacttgacaagaacaaatatgcacaaattcgcaacgaagaatgggaagaaaagcatctaatcgatgaactcatcgaattcctaagttgcaagaggtacatgtgttttctttccttttgcagactgattgtcatttttatctaaaataatgagattgtttaagactagtgcatatgtatcttgatagcaaattggggatttaaagtttaatacttttcgtgctaattcttgtagttactatgtaacccatattatttcaataattagggagtacatgtattaaatcaatgaccatcaaattcatatgcctaattcaatgatctaggacaattgcatattgctacaattatagttgcacacgactttttctgtctctggagaactatgtctcataatatggaatttcaatgagttataaacatgttttattagtttcatttgaagcaacatatctttatataatactttctttgtcccacaatgtaagacgtttttttcacactagtgtaacgtgtagtgtcaaaaaaacgtcttacgctatgggacagaaggagtatatcttagtttctactatatcttcattgtgatttgtttactaattccaaaatgtattcataaaggtacctcatcataattgatgatatatgggatggaaaagtgagggaattaattaactgcgctttctccaagaagagtctaggaagccgaataatcacgacaacccgcatagttaccgtctcggaagcatgttgtttgtctagagatgatgtatataggatgaaacctctttctgacgatgtgtcaagaacactcttctgtaaaagagtgtttcctcatgacaaaggatgtcctcaagaattggtgcaagtatccaaacatattttgaaaaaatgtggcggaataccactagctattattactatagcaaatctccttgctaataatcatcagataaagccaaaggaccagtggtatgctttgctcagttccattggtcgtggacttacacaagatcgcagtttggagcagatgaaaaagatattgttattaagttattatgatctaccttcgtatctgaaaccttgtttattatatcttagcatcttccctgaagatcacaagattatgaaaggcaagctaatatggagatggatatctgaaagttttgtttatagtgaaaaagaggaatctaacttatttgagcttggtaacaactacttcaatgagctagtaaatagaggtacggtctagccaattgacattgatgatagagaagataaacaagcatgtcgtgtacatgacatggttcttgatctcatttactcattgtcaagtgaagaaaattttgtcacaatattggatggtaccagaaggaaaatgcctaatctggaaatcaaggtttgcagattgtccatccaaaatagcaagatggatgtggatatttctaggatgacacatatgagatctcttaccgttttcaccaataatgttgtcaggaaagtgttggatatgtcaagttttaaagttctgcgtgtgttggatttggaaggttgtgatatctcagatgttgggtatgtggggaatctattacatttgaggtacttagggctaagatatactcatgttgaggaccttcccgctgaaattgggaagctacaatttttgcttaccttggacttaagaggtactaaaataaaagttctaccatcaagtgttgttcatctaagacgcctgatgtgcctgtatgttgactatcttacgaagctgccatctggaataggtaacttggcttccctagaagtgctagatacaatgatgctgtttgacaaggaccttgatgttgtggaagaattgagccatctaaccaagctcagggtgctccaagtttactgccatgttgatgagagcccagataaatccttaatgggatctcttagtaatctatacaaactggacagtcttgatatatatgttcgtggtggagaaatcaatttcatgagcgaagactgggtgcctcctctacaacttcgtagattggctttctcggtaccgtcgagttggttcaagacactgccgtcatggatcaatccttcatcgctttctctcctcacctatcttgacataaaggtggttgaagtgccattggaggccatcaaacttattgggatgcttccagctctttgtgttctcgagataatggatatttctaagttctacgaagagcgtgtggtggaaatggctgccctttcctctcttgcattattcccatgtgcgacagagtgtcacttcctttgtattggtgcagtgccgtccatgtttccactaggagctgcgccgaggcttaaacaccttgtgttcaccttctcagctaagtggaccacccgtgaaaactttgatttgggcatgcggcacctcccttccctggagcgagtcgaggtgcaagttatcaaggaggatgctagtgatcgggaggtggatgaagcaaaggctgccctgagggccgcagtagaggaccaccccaaccgtcccgtccttaagatatgtaagatatggtgacactagtgcaccagcatgcgttgaggtttgtactcctcgacaagcttacctcagttgtactatactaacctcagtagtcccttatttttccaccaagtgtttaattcctttcctcttctatttttcaattttaggcgaccgaagtgctaggtcgactcatcaaatcttgcaatcaggtatactatagtaatctcatttttcttttgtatggaccattaattaatagttttgcgtggaccgtacaatttttagtttgagcattttcttagctcgatggttaggcccctaaaacctaaacattgcaacatgaatccattcagcatcagccttttgatttatgctgcaaggatacatatggcccattttattgttatttgttcatgctaacatattacatatatagcgtaatcccaattagcaaacaacgacgaagtaatactcctctgtattttgggctttgccacctcctccttgctttgggaatatgtgtttctcttggatgaaccatatgttttttttcttttctgtttgggacattaattggactgaaccatttttgtgcatatgcttccgcaatccacatctttacgtatttggtagcagtatatgtgcttaactaaagtttcaacaaaactgaaatgtggatttcgccttgattacttatggtgcatgaatatatagtagcaattgtgacttctttttactacaagatctcgtataacgcagtccagattagcaagcaatttgctaatgtggtactaatgtgtgtagccttttctgtactaataggttcagtgcgttggataagacagcatcacgtgttacatatttgatgcacccgtttgcatgcgctgcaaaatctggactgctgcaggtgggatcgttggattaggcgttatattttgcagcgtctgttggagcaaacattctccagcacgtcaaaaaacgctatttcgacgttgtataatttttttagcgtgacgcgctgttggagatgctcttagttattatgtactaatgtctggttgcctggtctcctgtactttctgtacttacctttgtttccacaacagctttatttcaaactcataaaccgaaaaaccgcgttcagtttgtactatgttttgaagtttcatcttgtatttgtcacatgtggtcgaataaacagggacattagcggtgtcatttggacgcgccggctttgtaactgtatcaagtaatagatgtttctatttgggtagaactagaacttgaactgctgttacatctcacctgtgcttcagtgccgtttactctgtagtagaagtattggccatgtagtaacaatttctggatgtaagaaatcataggacatttggccctgtagtagaagtttgcctcggaatgttcgtacacattcattgaagtgaactgaataggtccatgtttttggtacggtgaggggaatgcatgttttaactgcaaaaagcctgaaagttttgcttcaccgccatgatcaaaaaatgaactctggttgatggacttgtctaccattaggccaactccaaccgaccgacccaaacggacggacatttcgtccgcttttcgttcgtttggatcgtccgtcggctccgtgtccgtttgggttatgatttgggtcaacggcgcttccagcggccggaccaatattcggccgcctggacggttggccgccgatttttgaacaaatacagatattttgcatattttgcaacaacaaatgatatagcatagtttcacaatcgaaaataaaatataacaaagtttacaagcccaataaaaattaaattgtctgtaaaatacacctattgattgcgaacatgatccaacatatgctcaaccattgcaactgaatatgagttttcaaatcacgtatttcatgaggaaattggatgaactgtgcaaacgatgccgcttctccgccatgcagtggaggtgccaggaaatgaaggctgagtattcacccaaattttttttttgctctaaatggagaatatgaatcaaacaacatacaactagcaatatatgaacaaaacaacactagcataatgacaatagtaatatttcaatgtatccgaccataacgatatgaatacataagtaccttttgattgatatccttcttacaatataactctgcggtcgcctttttggaagagattgatgacatcttcatccttcacttgatttaaaaattctctctcaacaaatgtaaccaaacaattgttcaaatattcatcacccattttgctccttagcttatttttcacatagctcattgaagagaataccctttcaacactagcagtagctactggcagaatcaataccaacttaagaagcttgtaaacaatatgatattgtgcgtgcttgtttgtctcaacaagcataactgaaagctgacacagatttttcaggttttgaaaccttgcatctctacgcacattagtaacatacatgtttagttgccatggaagtcttgccagttcatcacttgtaaaatcagaagcataaaactttgtagcaagcctaatcaacttctcttggtcataagcagcaaatagatgaagtggacaaaatgctgccatgcaagaaagtagctccgtgtttacctcatcaaatctaccattcaactcactgatttgcctatcaatgacacccacaaatatatcaaccttgaagcggtggtaattgatcgcaccattacataaaccccttctaggccggccaacgggtaagtaaggaccctccatatcaacaactttgatcttatgctttatacaaaaagatgtgacctttgtgagaaaatcatcccatccagcatcggtcctcaaaacttccaagtaatactttgtgtcacgaacaagctcaatagcatgaacaatatcttcgtcttgcttttgcaaagctctacacaactcatctgtgtatccaaatatttcttgcatcaagtgtgccatgaaaacaaactcaaatgatcgaaatgttgtctctatggatagagccgcttgtgcctccgcaccatggtactcgtctccaatcttgggaaggactcgtcgtagtgcaccatacacagagatgacatggttcacagttttgaagtgagagccccaacgtgtatcacatggccttcccaaacccatttcctgattcagcccactccctgtttccacttcttccaattccaatgcatcaatgagttcttcagcctgagctatccgaagcattctcatctttttacaagacataccaagagcatttaacaagtgtgcaagctgctgaaagaaccaagtacaatcaccactctccttagcaacagcaacaagagttaactgtagttgatgggcaaaacaatgaacatagtaggcagaaggggactcatccataatcagttttttcaggccattagcattacctctcatgttactagctccatcatatccttgcccacgaaccattgcaaaggtcaaattgtagtccataagaattttctgaattgcagcttttagtgtcaaagaggtagtatcttcaacatgagcaagaccgagaaatcttacaaccgcccttcctttcttatcaacataacgcaagcaaacagccaactattcattctgatacacatcactagactcatctgcaagtattgcaaaatgaccaccatcaagttcttcaatgactagtttagtagtctcttgtgcacaacattttatcacctcttgttgtatatcatggtgagtcatcttgcagttccgtggagcattcttgagaacaaccctgtcaacctcttcaaaatttccagctagccaatttagaagctcaaagaaatttcctttatttagtgagtcttcactttcatcatgtcctctaaatgccaagccttcacgcaacagaaatctcacacacttgagtgtccatgtcaagcattgtttatacaaagccttgtattgtgaggtgtttgaagcaatagactcccgaattgatgtttgtggtgtagtgaacctatcatacttctcttgagcttcagcatgagcactacaaacatcaccttcatgttccttcaatctcgacttcatgttccagttattaaatcccttcttcacaaaagcatctccaccgggacatcttgttttatccttgaacaaatagcaaacgaagcagaaagctctatctttttccacactatactcaatccatggatattctttaaaccaagcacgacaaaaatgacgctcttttccacttttatttgtaaacttgaacttatgattctttggttgacatgaccccatctcaatatatctccttctaactctatcttggtcattgacagcatacactgagatgggaatccgctttccaggatcatgttcgagtgcctccaaatctgcttgcatttgtccatcatcttcttcatgaggtgctgaggtttctcctctactttccggttcttgccataacaccaattgcaaattgctttcaaaatgaataggagaaatacaagtactagatgcaaccattgtctgattcagtatggatacttcatgagttttctttgtctttgaagccttttcccacattgcaaatatggtgctgctcttcattctctttttcatctacattaggaaaacaagcaataatgaaaagttgcatctagcagataaaatagatagacctaagagcaggactgggctcaaactaagactaagagaagttgcatctagcagataaaatgaacttgcatctacaattctacatccaaccatctagcagataagacatccagccatctagcagataagacatccagccatccaaccatctagcagtagcagaccagaccttctgcgcgggcatgctaggctcgtcaagtttaacccgagtgttccgcgtgtgcaactgttttgcaccagttgtatttgaacgttgagtctatcacacccgatcatcacgtggtgtctcgaaacgacgaactgtagcaatggtgcacagttggggagaacacaattttatcttgaaattttactgagagatcacctcataatgctaccgccgttactaagcaaaacaaggtgcataaaaggattaacatcacatgcaaatcataagtgacatgatatggccatgaactccgtgcttcacgatctccatcactgaagcaccggcatgatctccatcgtcaccggcgccacaccatgatctccatcatcatgatctccatcattgtgtcgccatcgtggttgtcgtgctatctatgctattactactaatgctacagcctagcaatatagtaaacacatcttcaagcacaaacgttagtttaaaagaaaccatgtggctcctgccggttgccgtagcatcgacgtgcaagtcgatatctaactattacaacatgacacatctcatacatccaatatatcacatcatgttgttggccatatcacatcacaagcataccctgcaaaaacaagttcgacgtcctctaatttgttgttgcttgttttacgtggctgctatgggtatctagtatgattgcatcttacttacgcaaaaaccacaacggtgatgagtaagttgctatttcatcttctccaagatccgcctcgttctaatctgattcaactaaagttgaagaaacaggcacccaccagtcaccttgatgcaatcttattgcatgttaacggtgaaaccagtctctcgtggttacgagtactatcggtctgggccgcttcgattcaacaatgccgccgaatcgataaaatacaaaggaggacagcaacttaaaacatcaacgctcacaaacccctttgtgatctactcgagaaaatcatctacgcatgaacctagctcatgatgccactgttggggaacgtagcatgggaaacaaaaaaattcctatgctcaagaagacctatcatggtgatgatcatctatgagagggagattggatctacatacccctgtagatcgctcagcgggaagcgttaataaacgcggatgatgtagtggtacgctcgtgagatccaaatctccgttccacgaacagcctcgcgatccgtcccacgaaccgccttgcgatccgtcccgatctagcgccgaacggacgacacctccgcgttcagcacacgtgcagctcgatgacgatctccgccttcttgatccagcaagaggggcggggaggaagatgagttcaccggcagcctaacgacgctccggtggtgctggtgttgctattcctgcagggcttcgcctaagctccgcagaaacgcgatctagacgagaaacgaagaagtagaggtgtctagatctgatttgcacgtggaaaaagttatctcaaatcagccctaaaacaccactatatataggaggaagggaggggaggaggcagcctcaaaccctcaaggtttggccaaaattggaggtggaggagtcctactccaatcctactaggagtaggattcctcctttccacttggaaaccctttccaactcttccacctttgggttttttcctctcaaacctcatgggccttagtgggaacttattccagctgactaggggctggtttatctcttcccacatcccatgagcccccttggggcgtgacacccctcccggtggtccccggcacccctcccggcactcccggtacactaccgatgagcccgaaacttttccggtgaccaaaacaggacttcctatatatcaatctttgtttctggaccattccggaactcctcgtgatgtcctggatctcatccgggactccgaacaaaacttcggttaccagtacctataactcaactataccgaaacgtcaccgaaccttaagtgtacagaccttgcgggttcgagaactatgtagacatgacccgagacacctctcggtcaatatccaatagcgggacctggatgtccatattggatcctacatattctacgataatcttatcggtcgaaccactatgccaaggattcatataatcccgtataccattccctttgtccttcggtatgttacttgcccgagattcgatcgtcggtatccaataccttatttcaatctcgttactggcaagtctctttactcgttccataatacaagatcccgtgtctaactctttagccacattgcttgcaaggcttgtttgtgatgttgcattaccgagtgggccccgagatacctctccgtaacacggagtgacaaatcccagtcttgatccatgccaacaccacaaacatctttggagatacccgtagtgcacctttattgtcacccagttacgttgcgatgtttgatacacacaaagtattcctccgatgtcagggagttacatgatctcatggtcataggaacagatacattggcatgcataaaacggtagcagtaaacttacacgatcatatgctacgttcagagtttggtcttgtccatcacatcattcccctaatgatgtgatcccgttatcaagtgacaacaccttgtccatggtcaggaaaccttaaccatctttgatcaacgagctagtcaactagaggcttactagggatagtgttttgtctatgtatccacacatgtatttgagtttccaatcaatacaattatagcatggataataaacgattatcatgaacaaggaaatataataataactaatttattattgcctctagggcatatttccaacagcgacgcggggtaggacgatggggacggagcggggtgagcctgtgcggccgtgcgggacgatgcggttcagcggttggagtctggatggtctggagcgatggatagatagtagatgtattttttttcaccaaaagtttgggtattcctatgaatacaggggcatacccctagcgccgccgatgccgccatgctgaggcaccacattgtcaccctgaaaattaaacccttgatcgtgtagacgtcccgggcgctcatcctctacaatcttattgtgcattatcacacaagagtcatcacttcccacaacttcttggtgctccaagttctagcaggatactgaactatgccccaccgagattgcagaacaccaaaagcatgctcgacatccttcctagcactctcttgctcctgggtaaatcttttcctcttctctccgacagggttggagattgtctttacaatagtggtccgctgtggatatattccgtcagctagataatatcattagttgtagttgtgaccgttgatgttaacattgatcgacgggctgttgccttcggcaagccttgcaaacaccggcgatcgttgaagcacgttgatattatcatgcgatccgaccatgccaaagaaagaatgccagatctagagatcttgagaggccacggcctcaagtatgacagtgcaagccttaacatggcccttgtactggccttgccaaacagaagggcagttcttccgtacccagttaatccagtctatgctgccaagcatccctgggaagctccggctggcattggtcgccaacaagcgggatgtgtctgcagcagttggctctctcaaatactcaagaccaaacactgcaataacaaccttgcagaatctgtataacgattctaggcatgtatactcactcatacggacgtacccatcgataagatcactgggtactccataagcaagcatccaaatggcagcagtgcatttatgataagatgagaagccgatccttccaatggcatcctctttgcattcgaagtagttactgtatctgaccaccccctctcgaatccggttgaagacatgcctagccatatggaaacgacgccagaatttctgatgtttgaagaggggattgattgtgtcaaagtagtccttccatagaaggaaatagccgctctcttggttgctattcagcggtggaacatgccccggaatcgagccccagaacagcgggcacagcctattaatgtggtcatggaccaacacggcaaacaacatctcctcatcttcggatgaggaattgtcggagtcgcacagaacattatggaaaaagaactcgtcggcacagtccattttgtacctcgaggccaatgatggcagctatgcttcccttgcaacggcgccaagagcggcaccaggaactgctgcggctatgccttaagggacttcctaggcaaatatgcaaaggatcttcccccgcggccttggagccttgcgttggtgttccctcgaagcggaaagggtgatgtagcacagcggtggtaagtatttccctcagtttgagaaccaaggtatcaatccagtggaggagtatctcaagatcctgcacaaacacaaaagcttgctcccaacgctatgaaggggttgtcaatcccttatagattgtttgccaagtgagaactgaaagtaacaaagtaacaaagtaaagtaaaagcggagatgtaaatgatggatatggatagacccgggggccgttgtgtttactagtggcttctctcatgaaagcaagtagacagtgggtgaacaaattactgtcgagcaattgatagaaccgcgcaaagtcgtgacgatatctatgcaatgattatatctataggcatcacgtccgagacaagtagaccgatactttctgcatctactactattactccacacatcgaccgctatccagcatgcatctagtgtattaagtccataagaacagagtaacgccttaagcaagatgacatgatgtagagggataatctcaaaccaatgataaaaacctcatctttttacccttgatggcatctacttgatgtgtgccttgctaccccttctgtcactgggaaaggtcaccacatggcagatcccaaaaccaagcacttctcccattgcaagaatcatagatctagttggccaaacaaaacccaagactcggagagacttacaaggatatcaaatcttgcatataagaaatcaacaaagactcaaatatatatcatagataatctgatcacaaatccacaattcatcggatctcgacaaacacaccgccaaagaagattacatcggatagatctccatgaagatcatggagaactttgtattgaagatctgagagagagaagaagccatctagctactaactacggacccgtaggtctaaagtagactactcacgagtcattggaggggtgatgatgatgatgaagaagccctccagctccaaagtcccctccggcagggcgccgggaagtgtctccagatgagatctcgcggaaacggaagcttgcagcggcagaaaagtggtttcgaggctcccctgattttttacggaatatttgggaatatataggccaaagatctaggtcagggggcggccagggaggccacaagcctgcccaccgccgcctccccctgggggcggtgggggagcttgtgggctccctggagcccacctggcttggcccagaggccccctaatcttctttcgttcgggaaaaaatcatttcgggatttttatttcgtttggactccgttccaaaatcagatctgaaaagagtcaaaaatacggaaaaaacaggaactggcacttggcactgaattaataagttagtcccaaaaaaggtataaaaggtacataaaacatccaaagaagacaagataacagcatgaaactatcaaaaattatagatacgtttgagacgtatcaagcatccccaagcttaactcctgctcatcctcgagtagggaagtgataaagaatgaatttttgatgctttcatgctacctagcatagatgccctttgtaattcctcttatgtgacgtgaatgttcagatccattagattcaaatcaatagtttgctattgacgtggaaacaataataattcaagcaaactagcaaggtaatcatgaactttcaaaataacaaggccaaaagaaagttatccctacaaaagcatatagtctggctatgctctatcatcattgcacaacgaatttaaatcattaacaaccccggtattggccaagtaattgtttcacacctttactttctcaaaccttttcaactctcacgcaatacatgagcgtgagccatggttatagcactatatatggtgtggaatatggtggaggttgcaagacaaaaaaaaaagatagtcacattaactaggcatatcaatgagctgtggagatgctcatcaatagatatcaatgtgaatgagtagggattgccatacaaatgatgcactagagctaagagtatgtgaaagctcttaaagaaaactagtgggtgtccatccaacttgcttgctcacgaagacctaaggcaattttgaggaagcctatcattggaatatacaagccaagttatataatgaaaatttcccactagctatatggtggtgacaaaacgagagactctcaatcatgaagatcatggtgcataatatgcacatgtgtggaaaaagtggtagcattgtcccttctctctttttctctcatttttttggtgggctgtttggcctctttttttattttttatttattttggtgggcatctttggcctcttttcgaaaatgggcttctttggtctctttttatttcctcacatgggacaatgctccattaatgatgatcatcacacttacaactcaaaacttagagcaacgataactctatatggaatgccttcggtaatttaccgtgacaatgatctagccactactagaatccagaaatttgccatctgcctgatctttaccgtctgctggccgatggcaaagagactctttgccatcagctatcagcaaacagacggcaaagaactggctgatggcaaagatactctttaccatcagtgtgttctttgccgtctgctaacggacgacaaagatagaataagcagagggtaaagacacggctgatggtaaagatggtccagacagacggcaaataatcaccgcagctgaagccatcccttttaccatcggggggcctctttgccgtcagcctagggcctctttgccgggtgcctcgacccctttgccgtcagcttgatcctaaggcggacggcaaagggggcggcgttctaacagccgacgccccatatccccaccctcatctgccctcacccctgatccccattctctctctcccagatccacacacctgtgcctctcctctccgccccctgatggatggatcccccacccctcgtgattcttctccacggatacgtgcctagatggaggagcacagtgcgtgcgtcctccatggatccgtccctcttctccttggatcaacgacgcaggagcagattcgccttgattcgtcgccgtttcgtccaattccggtccgcctcacccggatccggtccttgcgcacgacacccgcagccgaccttctccccacacatacgcacctcgatcggtcagtcaacccgccgaacctcggccacgcggcccggcgccatggtgggcgccacgaccatggcgtcagcgagcaccaagacgacggagctggacgcctcctcgtcgtggacacctgctgctaggtccgttcctcgcgatttttttcctttttctttttacgtgtgtactgactgaaattgaaagaagccgtttgtgtttgcgtgtgcgttggtggccggccggccggcagccgttcaaggtgctgcacggtggcgtgtctgcgctcatagcagatggcctcgccagcatgggggcgcacatggcatcgggctaccgccgcgtcgccgacatgcagctcagtatcaaccacttccggagtgccgccgccggcgacaccgtcctcgcacgcatcgtccccgactccccgtccacgtcgacggctccacctaggttagttcgcttccctgctagactatttcccctattttttgggtatgtaatagctagtatcgcgcttagtcaaaccactaggaaagtaggaattggattgtcaacctcttctccagtagtagtcgatcacgcagagcttaataaacaaatcagagatgctgatttccttcgatttcattgtgtcttcactccacatgggttagcaaaaccaactggttatatatttttacttcacatgggtgaccagaaccaactgattatgattttttagctaagatagttatgaaaaagggactttgttaattagtactgaaatgcataacatagattctagaatctaatttttttgttgtatataatatgaacaacatgattttttccaagtcataaattgcttggaaaatgccgtgcagattaccattgccatgcattcttctctttctctctgtggtctgtttcctcattgccattggcttggttggttggtgcttcctgcagactaggtcacacatgtagctgtagttaggaggtacatagatgttgttcttcggaaacgagccccttgattgattctttatgtagactagctcacacacatagtaatcaatctcaccgtgttttatcccatgccaacagttcatatcctattattcttacctcaacacgttgagaagtaagtaaattgttatcaaactgaatccatgatttatgcaggcgtcagattggacaatgttgagaaaggcgtgcaccagcaggactgcatgccctgctccatgtcgctggcctcagacgcggaagtgcggtagaagctacacttgaaacactaaataaaaatgtatgtcagcaaacttttgcaaaaaataataatcgtgtactgatggcgaatgggattaagaaccgtttgtgtcaaaactttacattactttacttactggcacttctgccctcgcaggtggcgttgagtctttactaagttattgacttgatttgccactccatgggttctaggtcttttactttacccccccccccccctactgccacaaaatatgacattttctggaaactatatgttcagtcgagtgggcttactaacggtgggtgagaattcaagttagattttcagagttgtattatgaggttacgctattgtatggtttccttaaaaaattgtacttatatttttctttggactatttattcctgcactttcttataaaaaaaattcagataaagttttctactcatgactccgaaaattgcattggccacggagtgtacgtcacatagggatatgctcataagaaaggttacttgaacatacctaaatgagttaactatttatgagtttgtcttttactaaaatgagacagtctacaccgtattgtaacaaaaaggagacctagttccccaacttacataatgttttagtccatacctcatagtacacttagctgcacaatgtgataatacgtcgacattgtttcttatttacagatttgcatgcatgttttctattgaaaaaatcacaggaaatagtaagtatgcacttattttttctgaccgtcaagataagtgcaaagtaacaagtgttctatattgtactactttgccaaggtgcatgttcgttaaccattttattaaataagatagttgaatgtttgaagacattaggttgataaacacgatgtggtctatgcttctcatgcttggaagagtatatttttgatgaaatgaagttaaatatcgtggctcttttcaacactcaagtagagttccttctaagtgctgccatattcaactgaatattgctgcaaccattgctgccaaattccgttagcattttttagcttatcgatcgatgttgtgcttgaatatttgcgagcttgacgggccattttttttagattctgctttaatctttaatttcataccttcctttgataattgaattaagcatggttttatttttaggctcaacaattggtcaaaaatttagcagccttagtgacactaaagattcagaaatttgcccacctataatgataacacagatgatcttataatctgttcaaagggagctaaactctatattttggttaactcttctcaaagtttactatggttaactcttctcaaagtttaatatggttaatatgtccaactggtggcgttgacctgcgacaaatgttttgtctggtttgtaattttgcctggcctgaaatatgtccagctggtggtgttgattctagctatgtaattttgtctggtctgagatttattttgctcaatgaatttttatatgaatgaatcacacttgactagatttatgtctgttctttcgtcttttgaaactaatccgtcaacatttgttttctatttcagtgtaatgaatttgttagctcagatatactcacaaccagagatggttccaatgatgcttggcatgacagccttaagagagagcgaatctgattgcagaggctggacatgccctcgtcgggtcggttccctgatgcctgaatatgaccctgttgccaagatctccatcattcctcgaggtcaggctggtgcgctcacgttctttgctccaagctaagagaggctcgagtctggactgtacagcaggagctacctagagaaccaaatggctgtggcacttggtggcaggtgcggtttttgtggaaattgtatttatttatttatgcatccactagttactgcaattcttcacagtgatgtcttgtgtgctaacatgtataaccacttttgcagggttgccgaggaggtgatctttggccaagacaatgtgacaactggggcatccagcgacttcatgcacgtctcacgtgtcgccagacaaatggttgaaagatttgggctgatgtatccattttggtgagaattacttggaatttagtatcaatttttgtttattgtgttgatgtatcatgcactcactaggcttttttgaattgagttatagaaattagcagaatcatcattgttcagttagaaatcaatacaaaccatataacgcagcagcatgacccatttcgctaccagtttgattgggtcaacccaatgatataaattatgtttgccaccttatgcaggcagatttccaagcttgaacaccatatactgttgataactagcttcgaaaaaattatcttcaaatgctctatcttatttgttctataccgagagatataatatatcttactagaccatgatggcgcacgttgccgcgcccgtccatttggtaaatggtaggaatttaaagaaataaattaagacatgaaacatggaaatcaaatttttatcaagaacaatgatgcagtaaagcacaccatcctctgtttttgtacatccctatgcgttccttccatcaagcagttgaagaaaattatgtgcggacattgtgctaccgcaagaaaaataattgtaatgctcggagcacatatcccgcaataacttggcttgtcctaagcaattagttaactattcatgtccctttcattatccaaccactgtctatctatcatgccatcatttttgttggtcttcataaacaatatggattcgtataaaacaatagaaacagtctaataaattgcacttgaaaccagttacctcttgcctgatgtccccgtgaccaccgtaataatttcttaaatcacccttcagccatccattcatttgaagctacaaaaagaacacactggcagaaaaaaaacactaagcgatgatcaaggtaaacacacccataatgggatccaaccatggaaaaaatggttagggattcaataaagaagaaaaaagaggaggaccaattgctccagaccggtctcatgaatgagaagatcgtgaagacaggaaacctcaaagaaataggaggtgcaaggatcatgctcgtcattaatttgcccataatcccagtgtttgttctgtcatcaatcaacataaacaatgaaataattttggagaaacttgtcatgacgtccatgtagttctcagtaagaagaaacaacagaccgtgtttagatcacaccaacgaggatcaggtgtgcttgttcctcggctccatcatgcttttctccaccatctgtttgctttctatctctctaaccagtcgatcaagaaccatcgtgatagattgaacatcggagtgaaaatattatacttgttcttgattcattcacaggattgtttgccgagtacgtgaggtccgtccacaaaatcatttaggagagtacaaacatagcacctagaattcaaaaccgagtgagatcaggtgaggagtagagcaggaaatccgtgaacttacgaagtggcccaggaacgttggcggcagctcgatcccaatcgtccatgctgctgcatgaggaggctggggcgaagggggtcgccacggggttccgattgttcgtgccgccgtcgccgtagatggggggaacaggggagtcgctctcgaaccgtcgccttcgcacctgcaccggaatcgcacaaacgctcgtcatccctcggtgcttaatgggcttgtcgcttgggcctaatcaaccagcatattgcgtttcggccatgggagtagcctccccttaggacagccagcccacgaaacacaaacatggcacgcagatcagatcgaatggccagaaacggtctgatcagaaaagttaacgatccagacatctcatggcgtgagaggatagggattaggctcagttttactgtcctaaatttgttctatactgagagatataattatgtgattctttaaattatgattgatataaatgttatgaatcagaaatgtaaaataacatgtaaattagttctagcccgtgaacttacacgggttgttgactagtagaatttaatatgttttgatgcatcatatatgttagtattttttactcttgaattacacttgaacacatcttcctaaaagcaactatttagatgcatcatatatgttagtatttttattgaaagttctaaatcgaatacagataataattagtctttttttcttcttcttcttctaactttcttaattactcccatttttgcagatttgattcatttcatggaacctcacattgatgggctgctagtgtttagtttttttatttgtattgacgaacaatgtaaaatttatgtatgtatatatagatgaattatgtgaaactatgtattgtgctagcctatgtgttctctagcttgttaaatatttcatgatgatgttggaaatatatatgctgtgaaatatatgtgttgaagatgtttgaaatatatactgtgaaatgtatatgtatgtatgtatgtatgtatatttgtggtatgaaaatacagggaaataaaataaaacagatgaaaaaggagcaatagcaaagctctttgccatcagccagcagacggcaaaggggggaatctaccccctctctctcccctctttgccgtctgcccccacatggcaaagggggtaaggcagacggcaaaggggggaatctgcaccctctctctcccctctttgccgtctgcccccacatggcaaaggggggaaggcagacggcaaaggggggaatctgccccctctctctcccctctttgccgtctgcccccacatggcaaagggggaaggcagacggcaaagagaggaggcctgccgttaacacttaacggggacgttgcaatatatgccgtcccatttattttgtcgtctgccccctcatggcaaagattctttgccgtccgctttgagaaagcagacggcaaagaacctcttcaccggatttttttttgccgtctactttgccgtctgctgacagacggcaaagcctttgccgtccgtggttgcatcctttgccgtccgccttggcagacgacaaatttctaaattccagtagtgagcatggcatagacatcaatggaaacatcatgctagctatcttatgatcatgcaatggcaatgtagacgtggtggcacatgtcatggtggtagttgcatggcaatatatctcggaatgactttgaaaaagccatagtaggtaggtatggtggctgttttgagggaggctaatggtgggttttgtgcaccggcgaaagttgcacggcactaagaagatagtgatggtggaaggtgaaagtgcatctaaaccatggactcaacattagtcatgaagaactcatatacttgttgctaaagttttattagtaatcgaaacaaagcattcaacgcatactcctaggggaagggttggtaggtataaaccatcgcgcgatcccgaccgccacgcaaaggatgacaatcaatatactaatcatgctcagatttcatcacatagaggttcaccatacgtgcatgctacgggaatcactaacttcaacacaagtatttctagatccacaacacattactagcatgacttcaatattaccataaccacaactcaaaactaattgagatgaatcaaacttctctaactattcaatgcacgtgaaggtggaagttttcgtatccctttggataaataccccttttgagactactttcaaagcatagatcaactaccaagccacgtaccgctgtgctctaaaagatataagtgaagcacaaagagcaaaagtatctagctcaaaagatataagtgaagcacatgtgagctgaattgtctaccaaaagatataagtgaagctcgacaaaatcacggtggatgcatgtctctctctttaggtgtgcagcaaggatgattgtgacacaacaaaaataaaagactctatgatacaagacgctccaagcaaaaacacataacatgtggtgaataaaaatatagccccaagtaatattaccgatggattgaagacgagagaggggatgccttcccggggcatccccaagcttaggcttttatggcatccttgaatctcttggtgtgccttgggcatccccaagcttgagctcttgccactctttatctctttgtctataagaacttcacccaaaacttgaaaacttcacaacacgaaacttaaacagaaactcgtgataacattagtacaagaaagcaaaccaccacttccttaggtactgtagaaaacttaaattctacttgtgctgatgttgggttactgtattttcaatctaccatggctaatacccccaatactatccatagtttcatcaaaataagcaaccaacacaacaaaaacagaatctgttaacagcagaccagtctgtagcactctgtatatttcgtatacctcttgtacttcaaaaattctgaacatttacgacagtctaaagaatttgtgtagaaatcagcagcaaacggaatcaactcaaaagctcttacagaaaaaaaatgaaaattattttcgtgagcataaagtttctgacttttccagcatgaccaaacgatcatccccaagactaatcataacggttttgcttggcacaaacgcaaaaagaaacacaaaaacacaatcataacagaattatgaaagtgtggaaaacacaaaacagaaagaaaaaggatagattcgttgggttgcctcccaacaagcgcttttgtttaacgcccttagctaggcataatatgatggaatcacgtatagtcatctttggtactcaaaccataagtagccctcatcatagattcataatgcattcttattttctttctaggaaagtgctccatgcccttttttaaaggaaattgaaatctaatattcccttccttcatatcgatgatagcaccaatagtccttaggaaaggtctaccaagaataatgggacatgaaggattgcaatctatgtcaagcacaatgaaatccacgggtacatagttcttatttgcaacaataagaacatcatcgatcctccccatgggtttcttgacagtagaatccgtaagatgcaagttaagagaacactcttcaatctcatgaaaaccaagaatatcacataaagactttggaatcgcggaaacactagcacccaaatcacacaaagcattgcactcatagtttttgatcttgattttgatggtaggttcccactcatcatgaagttttctaggtatagagacttctagttcgagcttctcttgaagagatttcatcatagcatctacgatatgcgcggtaaaggctttgttttggctataagcgtgtggagagtttgcaatggattgcatcaaagaaatgcattcaaacaaggagcaattatcataattgaattccttgaaatccaaagtggtagtttcattactactcaaaattttgacttcttctactccactctccacacctttgtcctcaagataggtggactccgaatcattggggcgtttttcaaccaaagtggattcatatccagcccctccataagtaggtttgacacgcgaaaacaaagattcaagaggagaaacaccaagtactttaagatcttcgtgatttgcatcactagaacgcacccttttaaaccattcatgtctagcgcgaatttgggcggttctttctttgctctcattcatggagatacgcatagctttcaaagtttcatccaagttgaccttgggaggagcgcatctaactttcaaagcatcaatatcacaagacatcctatcaacgctcttagccaaatcgtctattttgagtagtttttcctctatggacgcattgaaaatcttttgagagttgatgaactctttgatattactctctagatcagagggtaatttgttgggatttccataagtgttgtcataggaattgccataattgttagaggagttactaggaaaaggcctagaaacatagtttcctctaaaagcattgttgttgccaaaattgttcctaccaacaaaattcacgtccaaactagcgttgctactctcaatcaaagaagatagtggcatgtcattaggatctacagtagcgtttctactagcaaacaaattcatcaactcgtccatcttagcactaagcgagttaatctcttctatagcgtgcacctttttgctaggaggcgacctttcagtgtgccactgagagtagttggtcatgatattgtctaggagttttgtagcgtctcctaacgtgatttccatgaacgttccacctgaggcggagtccaagatattgcgagaagcgaaattcaaaccagcgtaaaagatttgtataatcacccacaaactcaagccatgagcgggacaatttctaatcataagcttcatcctctcccaagattgtgcaacgtgttcatgatcaagttgcttgaaattcatgatatcgttacgtaaggagatgattttagccggcggaaaatacttggatatgtaagcatctttgcacttattccaagaatcgatactatttttatgcaaagaagaaaaccaagtttttgcacggtctcgtagagagaacggaaaaagcttcaacttaacaacatcattatccacatctttcttcttttgcatatcacaaagttcaatgaaagtattaagatgggatgcggcatcttcactaggaaggccagagaattgctctttcataacaagattcagcaaagctgcgttgatttcatacgattccgcactagtggcgggagcaatcggagtactaataaagtcattattattagtgctcgagaagtcgcaaagtttggtgttttcagccatgatgacttcaacaaacaaacaagcacacaagcaagcaagaaaaccagcaaaggaaaacggcacaggcgaaagaaaacggcgaaggagaaaggcaaatgaaaacggcaaatgtgaagtgggggagaggaaaatgagaggcaactggcaaataaaagtaaatgcaagagatgtgtttgtgacacttacttgatttctcctccccggtaagggcgccagaaatacttcttgatggcagctatgcttcccttgcaacggcgccaagagcggcaccaggaactgctgcggctatgccttaagggacttcctaggcaaatatgcaaaggatctcccccgtggccttggagccttccgttggtgttccctcgaagcggaaagggtgatgtagcacagcggtggtaagtatttccctcagtttgagaaccaaggtatcaatccagtggaggagtatctcaagatcctgcacaaacacaaaagcttgctcccaacgctatgaaggggttgtcaatcccttatagattgtttgccaagtgagaactgaaagtaacaaagtaacaaagtaaagtaaaagcggagatgtaaatgatggatatgaatagacccgggggccgtagtgtttactagtggcttctctcatgaaagcaagtagacagtgggtgaacaaattactgtcgagcaattgatagaaccgcgcaaagtcgtgacgatatctatgcaatgattatatctataggcatcacgtccgagacaagtagaccgatactttctgcatctactactattactccacacatcgaccgctatccagcatgcatctagtgtattaagtccataagaacaaagtaacgccataagcaagatgacatgatgtagagggataatctcaaaccaatgataaaaacctcatctttttacccttgatggcatctacttgatgtgtgccttgctgccccttctgtcactgggaaaggtcaccacatggcagatcccaaaaccaagcacttctcccattgcaagaatcatagatctagttggccaaacaaaacccaagactcggagagacttacaagaatatcaaatcatgcatataaaaaatcagcaaggactcaaatatatatcatagataatctgatcacaaatccacaattcatcggatctcgacaaacacaccgccaaagaagattacatcggatagatctccatgaagatcatggagaacttcgtattgaagatccgaaagagagaagaagccatctagctactaactacggacccgtaggtctgaagtagactactcacgagtcattggaggggtgatgatgatgatgaagaagccctccagctccaaagtcccctccggcagggcgccgggaagggtctccagatgagatctcgcggaaacggaagcttgcggcggcggaaaagtggtttcgaggctttcctgattttttacggaatatttgggaatatataggccaaagatctaggtcagggggcggccagggaggccacaagcctgcccaccgccgcctcccccctgggggcggtgagggagcttgtgggctccctggagcccacctggcttggcccagaggccccctgatcttcttttattcgggaaaaaatcattttgggatttttattccgtttggactccgttccaaaatcagatctgaaaagagtcaaaaacacggaaaaaacaggaactggcacttggcactgaattaataagttagtcccaaaaaagatataaaaggtacataaaacatccaaagaagacaagataacagcatgaaactattaaaaattatagatacatttgagacatatcagccaactgtcgaacagcttgtaggcgtggacgacgaagctgaccggcgacgacggtttggggtcggggaagctgcggtgccccggcggcgctgcggccctggccgcggcgtggggtaggctctgcggtacgggaggacgcagccgaaactgggcgacggtggcggcggtggcgaggggactaggggcaaggcgaggcgatggctagatgggggtggagagcgaccaatgtgccaccgactgggaggccagggaatgtccgcgtccgctttgtgtccgcgccgacccaaatcaggctcaaaattgggccggaaataggtcggcaggcggacgaaaagcggacgcgcgtccgtttggatcgacacgttgggccgtcttttatgtccatgcgtatccaaatagacgaacgtaaacgaaatggatcaccccgttggagttgcttttatactagatatcatgccgactattgactgttcattagtaactcgtggaaagttcacattgatgccataagctcatgatgacagtaccttttgagatctcaacttggtgcttggttgttcttgtgtttgtgtaccacttatttactgtagccgggtgacacataggaccaaaccttgtggggtcaacacggcagtgactctgtggggtacagccccccttctcgccacgattattatatctacagcttttgtttgtttggagagggggagagtaagggtgcgtttggttggagggataggctagggtggttgtgggtatccccaaccaggtggctggggatagcccttttttttgtttggttggaagggtagggttatcttttttttgtttggttgggaggatggatcctgccgcgccggcctcctcccgcgccctgccgcgccggccgcctcccgcgccggccgccctcccgcgccctgtcgcctcccgcgccggccgccctcgcctcccgcgccggccgcctcccgcgccggccgccctcccgcgccctgtcgcctcccgcgccggccgccctcgcctcccgcgccggccgcctcccgcgccggccgccctcccgcgccctgtcgcctcccgcgccggccgccctcgcctctcgcgccggccgcctcccgcgccggccgccctcgcctcccgcgccggccgccctcgcctcccgcgccggccgccctcccgcgcccagccgcgccggccgcctcccgcgccggccgccccagagtggttgccaccgcccccccattttttgcggttgaccacgtccctttttttggagaatattcccagcatctggttgcctctatccctcctcgccccagatccaaacgcatggcaaccacagaaaaaagtggttatccctgtccctgggaggatatccctccaaccaaacacaccctaagtcagctgagatagaggtcggacccgaggagtggatctcacggcggggactcccccggcccctgaaccccggctgggatgctccggtggctggaacgtcctgccggccaccggccacctcctcgtcggcgagtacgtacagatgctggttctcgcagaacaagtgtatcaagaagtatgaggtatatttcgtttcttccggatctggatccgattaaattggtttcttcgactaaactcatggaggtgtgcaaattgaccttaattgcaaattgctggtcgcacgccatagatcttctagcgttctagatcgtttagtctggtttcttcatgtactggccagctcggtgtgtgcatcttaattctgaagtgcaagatgttggccatcgacgccagatttacagtgctaatttcgtcgtataataagctactcttaagtctgctctagtgagtctatttgttgccagatagcttgtactacacgcttcaatactgacctccctttatgaagaaacaatatcagaccaagacagagtagtaagctcgtcagagctgttccaattttttttagtgcgcaacaaatgaagaggatattattatttagctgttactaccatccagtgttcttttagtgatggttggtgtgtgtgcatcttaagtgcaataagttggtgattcagtgagtgtggcgttgcaaaggcccagctccatggagctcattttgcaaaaataataataattcaaaacatatctaaaagtttaaaaatgtcaaatttattctacaaatacatatgcatattcttcaaatatgtataaaatttcatcaattaatttgattatttgtgtctacacaaaaaaatcaaatatcttacccaaatacaacaaagaaaaagcctattttaatctgtgtattttcttttttgtgtacacatatgaatatatatgttcatgacattttatacatgtatactacaaatatatgtgtacatgtaaactttctatcagattttttgagatgtggaaaaggtatttttgctgaaaaataaataaagagctatatagaactcggcctctggttacacttttcggtgattcactgtaaatttatagtgcttggtataagatatttatctcctaggtttttttttcattttttgtcttcataactagctcattattcattattcaaaatttattgttgtcttctctttatgaagaacccgtatgcacgtgttgacctgcttgccaactaatcattacaaacacttcaaatgcataggtacttgggcgtgggctgagaatcacaattgttgtggatttacaaagatgatagcccagacgaagaataccttgttatttggctgttaccatacataattttatctctccgcaacaaatatattagatcaagcatcatgtcatggacccgataagctttcgctcttctcgtcgttgatgcctaccagttggatcatgcttctgtttacgagctcattgaagcaactctctcctagctcaaattggtccaatttctcctttacatgatacacaaatccttcggctatccatctcaatatcagttagtccctcttaattttgtaatctcctaaaaagatgattgcatataataacggatgtgaaggtagatgataaaaataacacaatctttactcttaaacaagttgggatagactagagataaaacacaataggagccacacacaacaacaatatgaactgtagcaaataaatagtaaaagaagctcttgacttgtagattatgtcaaagggatgatctagactcaagcttctcttagtaatagtctgatcttccttgtcatctatagggttagttgttatatctaagtatatttgtagaagattaagcaaggtcacttgatatgataatgggtagccgagtgctttatttatcattgaaaacaagagattagcctatttgagctcagtggtagatttactcaatgagatcataaatagaagtatggttcaaccaatagacatcaatgttgatgaaggaatgaaaacatcttattgtattcatgatatgatgattgatcccatatgtttttgccaagtgtgaagagaaccacttgcatggcaccgagtgaaagtggtttttacaaaggcaagatttgaagattatccatctgaaagagcatgtccgatatgaccaccatcagaattagcaatggcacaagtgaggtatcttacaatatctatatgtgctattgttgatagtgttgcttatgttgactacctgtgttggatttagaatattgtgttgtatgtttcatcaatggaggctgctgaaactcgaagaacgctgcatttgtgtttcttctgcaagtaaatgaacctgtccttgtgattgcatcctcttatgcctgaattctatcatctcttctatcgactcaagaaccatcaagtttcagcggcgcctcctgtgtttaacttgttatatgaacttatttttccatttctttgtgctgtaaggaagtgtgtaattatgatgtactgctagcagcttgctggttaattttccttggcattttgaatcttctttggcatgaagccctcattgtgattgttccgacttatgcctggattctattatcacttctgcttattgtagaaacattcagtttctgctgtgcctcttgtattttgcttatgatgaacttccttttccatttaattcttttgtaaggcagaatatgtgaacttttttatttattcattttgtaaggtagagtatgtaattatgatgcagtgttgcctggtttgacggctttgatcatccattgcgtctctttctttctagcagtttccagaatcgtggaatgcaaatatgttcgttcagcttatacaatcatttgacatttcaccttttatctgtaccggactaccggttgcaatttgttttattggttgccttgtatttgtcacgttcgtccaaatttggcagaacaaatggggagtgttattagcctgaactgatgcagcaattcctggaggtaaatgatttggattggcaaacaacacgtgtgcaaaacaaaaacctgtataagtttacactaatgtctccctcactcaatttctaatgatttctgattgttttttacttctgaaaatgtactctcatttgcatgtcacgtacttttacgatgaccaggtacacagccggcacactggtggtcattgctaatctcttagtcacagctggaggtcactgctctctgcagttacaaccgtatttaaatgggtttaaatttgtcatttcctttttttcctccccatacacggcggtgtgggattggttcgccggtggtgccaaagttgattgctggagccaactagccgtgtctgtcttgagtcaatgcacatgggtgttaattattgttcccgcatacaaaggtcatcgttgattgatttctctaccttttcttttgcacaagacaacgacgcacacactaatagtcaccgttggtttcttcctacttttctagctagtttatctcccaggaaaccaagagtgcactctcccaactcccttccacccacataccaccacaacagggtgtagagagttcaagctagcttaaacatggagatcgccatggtgactattaggcctctcctcaccaaacttggtgacctgctcgccggtgagttcaccttggagaagcgtgtgagggaaggcatggagtctcttgtcacggagctaaccttgatgcacgccgccctccgcaaggtggcaaaagtcccgccagagcagctcgatgagggggtcaagatatgggcagcaaaggttaaggagttgtcctatcaaatggaggacatccttgacgccgtgatattgcgtgtggaggatgacggtgagcctgccaaccagagtaaattgaagaagttaatcaagaagatcatcaagttattcaagaatgggaggggtctccatcgaatctctgattctctagaagaagtgatcggtcaagctaagcagttggctgagcaacgtaaaagatatgagcaagaaatgcatgacacaagcgttggtgtcagcgttgacccccgtgtgctggctctgtacacagatgtgacagagctcgttgggatcgaatatgcacgggatgagttgatcaacatgttaattgggggtgatgattggttaaagagtcaactgaagacagtatctgttgttggatttggtgggctgggcaagacgactcttgcaaaagtagtgtatgaccagatcaaagtacaatttgattgtgttgcctttgtttcgttttctcagaatcccgacatgaagaaagtcttcaaggatattctctgtgagttagacaagaagaagtattcaagcattcatagtgcaacaagggatgaaaagcagctcattgatgaactcaatgaatttctgaagagcaagaaagaatttcttaagagcaataatgaattccttagccataagaggtatgttagcttattttttttcctgccaacatcaattctctgttgcgtaataaatcatggtattattttttgtattgtgtataaacatcttcatagcacattgttagtcacccactaggtttataatcttcatacaaattcatgaaatgttctctagtgcatttttgcttagataacccatcatttaataatgccttctctacccaaacaaaattcttagatatatctagacccgatttatcaactaactatctgaagcatttaaataggtacctcatcctaattgatgatatatgggatgaaaaagtgtggcgttttatcaagtgtgctttccccaagaatagtcttggaagtcgagtaatcacgactactcgcattcttagtgtctctgaagcatgttgctcttctagcgatgatatttacaaaatgaattctctttctgatgatatctccagaaggctcttctataaaagagtattttctaacgagaaggggtgccctcatgaactgttgcaagtatcccaagacatcttaaagaaatgtggtgggataccattagcagaagctgcaggaagcagaagctgcagtgagggccgcagtggaggagcatcccaacggcatgcaccttaatttgtccagttggtaatgttgccacattgctaaaggtacacctactccacctccacgcaacatgcattattcacatttttgtgttcacaagtgccaaatgttcattcatctctctttgttttttcaatttcagggggaggaagatgcaaatgctgcatgtgatgaggttcgccactcgcccatgggctacctctgttacacatacattatttttctttcacctattgttatgtattcagtgttcatttctgtcattgcttccaatttcaggtggagggattgattcgtcataccatgaaatcaggtactccatcagttagtagcacactacacgctatttaagcatttttcctttagcctattttctgtagctagcgagttcgatcagtccatcaggactgtctaattttttttatttttttttgcctgccataagattaagcatgacgtttcctagatcagcaaacagttcactaatatatattcctttgtcggtagttggatgaactgagttcgtttttccttgtacagctgagcatatctatgcccttctgtatatgctggatgaactctgtttttcctttgggcctaccttcctattttaagtgccaagaaatatcaagactttcttcttggttctgaacttttgatttcttgtggtgcgcaaacaaatagcactacgtgttgttactatctagcacaagataatggcatgaggattaacaatgtgaaaataatatgtatgccctttctgtacttggatgaactctgttttcatatgcagcatttaactgaaccacctgtatgaatgtgcttccacatggcattgtaggtggcagcaactaacagatttcgtcgacatggattcaatacatcacgcgacagcttcctacttcccatgtggctgcttccgttccaaccaagactgtcaagagcattgtatttctgttgccgtttgatcatcttgtgcaacgacgtaacgctctcatgcatactgtccacttacgtctgaattttccttgagggcaactaatgaacaatgaagtttgtagggcagaccccatgcatttttcccatgatgaaccattaattattttcctggtttgtttccacagatttgtttgtaacatcattcagatttccagagttgtgaattgagatgccgctttcggtttgtacatttattctgaaaatataccttgtactccttccgtaaaaaaataaatatgagagcaccaactatttaagacacacatacaccattgagagcaccaactatttactcccccattcttaataagatggatataaataaaatttgtattttgcgtagcattagtaagcaattttgtgcgttaatttcatttttatatgaatacgttggcaaatattttatggaaaaatatatattaaaaaagcatttaagattactgttgttgtattcacgaggttggcgcccgagcaaaatagcatactcgtggttttgaatttacctattttctgaaattatccatttcagtgacatccgtccgaccaaactgagagatgagccaaaacaattaatgattgtatcttagtcatcctattccctctgctcctaaatataagactttttagagagaattcattatgaactatatacggatttttgtagtcatatttgaagatgtagattcactcattttgctctgtatttagtctatagtgaaatctttaaaaggtcttatatttagaaacggagggagtagattcctaatccttccaacccgacacgtatgccacaagtggacacaaaaattgttatacaagttaccgacggcaatgctgatgcggagtttagatcaatcatcggtcttgaaattagtttagtttgtaaaataagaaaactacccgacgtgcacccattgcatctaacagctttggcagcattttgaggtgtaattatttgtttataggttgggtccagtgggggctagactctgtgatccgtttaattcgagttgtagttttgccgacagcaatgcgtgatgccatagttgtattgagcagggaccattatttacatgactttaccacagttgcagtgtgaatggcttggacactcgtacggtgcttaacattaaaacatctacagccgaaccccttaaaccctcctcaaacgctagggcaggccgcccggtcactgaccatgttaaatgcaacaagttgttacggccggagatagataggccaaggctattagccggttattagctaatttattttctctctgtctcttgtaaccgtatcccttatctcttcctccccatgatctcaacaatgtatgcgctacagggaggtgcgcccctgcctataaacatgcacgacatccctccaacgaggtaagacgttttctggctatcgcacatggtaattagagccttcctcttcccaaccatcagctagctcgcaaaccccattagtgattcaccatgtcttcctccggttcctcctagatcggtctcaacggccaaatcacagaaactcacccgcaccaactacattctgtggcgtgccaagatcacgacgcatctgcggggagcaggcatcttcggctatgtcgaaggcagcacgccggagccggccaagcttcttcccgtcaaggacaaggatgggaaggagtcctttgagcccaaccctctccacccaatctaggtccgggaggatcaacaagtgctcgggtacctcctcaacaatctctccaaagaggtgttggtgcaggtagccgcgatcaccacagcgcacacgctctagacgaccctagcgcccatgttttcctctcaatccttgagccgtgtgaacaacattcgcacggctttgcttcacgcgcagaagtgaaactagtcgatcgccacctttttcgcccacatgcatggccttgcggacgaactcgccgcggccggcaaaccccttcaagacggcgagatcgtctcctacatcatccacaccctcgacatggagtatcaacctctggtgtcagccctcgatgcacgcaccactccagtctccctcgatgagctcttctcgatgctgagcaacttcgatcagcgtgtcgctctctaccaaggatcgggcggattcaaatcctccgtgaacgccgcttctcgcggccgcggcgagcgccaccgcggaccttcatggaaccacaacaagcctggaggcggcagggaaaactccagcaacaacacccctcgtgccgggcgaccctcctccaccatcaacaagtgtcgccgcagcggttcctccagggcgcgacaagataccccacccccctgccaaatatgcagcaagccttggccacacctccaaggactgttggtactgctatgatgaagacggagattcttcccaggacgaggacaaggtggctactactgcggatggatcctacggcgtcgacaccaactggtaggtcgatagcggcgccaccgaacacatcaccggcgaacttgacaaggtgaccatgcaggagaaataccgcaaaaaggaccaaatccacactgctagtggtgtaggtatgagaattcgtcacattggtcatacaattattaaaaccccccatcacaaacttcatctttgaatatttttgcatggtcatataattgccattgataaccatgtcttccttgaatttcaccccttcttctttttgatcaaggatcaggcaaccaagaaaattctctatcaaggtagatgcgttcgagggctctatccattgattccggagcatagaagattcaataaacgagtctatggtgttgccaaacttttgtcaacacggtggcacgatcgattaggacatgcttcattttctttagttgaaagattgcttaggaaaaataaggtctcaactgtgtgcaagatgtgtctgatgttgtaggtgaaaataaaaaagaaaatgatgaagaaatcagcccccaatgtgccatatttcatgtgtcacggtgcaggagacaaatcctccttgggatcgacgcaggatcaggagcagtccaggagatctgccccgggatcggcgcccgcaggtgcggtagacgcgccagatacggcaacatcagagtcgaccacaccgcgccaaccatcgtccgccactttgcggtctacagttggccagcctgacatacgcttccccgacaaatcgcggtgttacaagcggcgtgatcagcggcgcccgacaggtgcggtgtccggcacggatgaccagctggagaggccaggatcttcagcaccctccgccatggtcggacaacagcccgcaaccacagaggatcctgcaccagatcgagacgaagttgtcttggaatcaccagctcccagcactcctgtgggctcctcgggatcttctgcatcggctgatcctgctgcatcggttgatcgtgctgcaccagccccacgtctcaccacattgcaaaagggggtaattcgaccgttaaattataagcacataacaaaatatagtcttgtatgttctacaggagaacgaggtaaaccgcacacccttgagaaggcacttggtgattacaaatggaaaaaggcaatgaaagaagagtacatggcactagagaaaaactacacttggcatctagttctcccaaagcaagttagaaatattattgattgcaaattggtattcagaatctagagaaaatctaatggaactactgactgctacaaggctagacttcttgcaaagggcttcaagcaacagtatggcatagattatgaggacacttttagtcctgttgttaaagctgtcactattcatcttgttttgtccattgttgtttctaggggttggagccttcgacaactagatgttcagaacacgtttctccttgatgttctggaataggaaatatacatgaaacaacctcctcggtttgaaaacaaaaacaaaccttcttatgtatgcaagcttgataaatcgatatatgtgttaaaagaagcttcaagggcatggtactcacgtctctgtcacaagatgcatgcacttggtcttgttccctgaaagtctgacacctcattgtttatctacaacaagtcaaatacatccatatttgttctcatatatgttgatgatattattgttactaattcatctgatgaggcgatcacatgactcctgaaggacctgagtatagactttgctctcaaggaccttggaaatttgcactatttcctaaggattgaagtgaagaaacatgaggatgtacttcatctctatcaggaaaaatatgcagctgatctagtgaaaaaggctggcccgcaagactgtaagccctcatctactccattatctagttcagaaaaactgtcccttacagaaggaaaactcttgaatcaagaggacaatatcagatataggagtctagttggtgcacttcaatacttgactctaacaagaaacgatctgtcttttgctgttaacaaagtgtgccagtttcttcatgcgcctacttcagttcacttgactgtttcaaaacacatcattagatatgtcaaacgtactttaagtgttggcctatattttagtaaatcaccatctatccttgtcagtgccttctctgattcagattggacaggatgcctagatgataggcgttccactagtggttttgctgtattttttggacctaacttgatatcatggagtgcaaggaaacaagcaactctatccacgtcaagtacagaggcagaatacaaagctttggtaaatgccacatctgaaattatatgggttcaatctattcttaaggagcttggtgtgagaaccatcaaagtccccttcttatggtgtgataatcttggtgctacttatctgtctgctaatcatgtgtttcatgtcaaaaataaacatgtagaaatgatttccactttgtcagagaaagagtggccaacaaacaacttgataatcggttgatcaagttgcagttggattcaccaaaggctctaccagtaagaagcttggaagattttaaacataatctcaacttgatgaagttgtgattaaggcagggtgttaaatgcaacaggttgttacggctggagatagataggccatgactgttagccggttgttagctagtttattttctctctatctcttgtaaccgtatcccttatctcttcctccccaagtcatgatctcaatgtaatctcaacaatgtatgcgctagagggaggtgcacccctgcctatgaacatgcacgacgtccctccaacgaggtaatacgttttccgcctatcgcacagaccagtcacaaaaattcgaccctaacggatgcttcaaactggcttcaaacatccaggctgaccgacacccctatttctagctcaaatatgggccagatttggggaagtccgggcgcgcctgggcacgcccacctggcccgtgctggcccgcatctactccacatatattcttctccatctgctcgctggaccaaaccatagccacttcactttactccgctccactcttatccgccagccaagctcaatttcggcatggcgggcaacagatctaagtccttcacctcaagatccatcgaccacgagctcgtcccacgcagccccgaggaggagatggtcgtccggttgtactccgccgctccgaggaggcggccacacgacggcaccgctcggactcgcaacgccaggaatccattgcgctcgcacaaccggtgcttcgatctggcgtcgctgcctcaccggaggcggtgcgatccgtatggcgtccggacccctcctttggcgcgtcgatcacgaagcatggccgtcctcggacaatgtcatggctcggtgggcccatcgggcaaggcagcgggcacgggatgcggcggtggctgttgaagaggcggagtcacactctcctgcgccccgtaggatgcttcagtgcgggcgacgcaaccgtttcgtggtggacgtcgactccttcaaggaaggatccgtcatcgacctcacatcgactggcaccgtctgggttacgggctcccacgaggaagagtagggcatggaagacagcgggagctcgactcccgtgagccggctagtgtcacttgtcttacattacctcgtcggcgatcggaccgacactgtgaggggcgtagccagctgccggacatgatcacggcggagccggacgagctccgcttagtattagacttatgttgtatgtaatattatgtatttaaggtttttaatttaaggtattcgtatgtggaatttattattatttaagacagtgacgtcccggcgtttgaggggtcgaatttataagatccggctgtacatgcttttagtggaaaaccctatttgccgcgtgttgcggcaaattgtcgtggcttcgcacaaaaaaacacaagctaggatgatctaggccggcctattaatagttgtagggatgccggttttgggaaccttctagacgaactttctagaagattccctgaacctgtattttttcttttttcgtttattctttctagtttcttttttttctgtttctgtttcaaaaatgttcctgattttcaaaaaatgatctggattttcaaaaaacatttgggattttcaaaatttgttcttcaaattcgaaaatgaatttttgttttagaaaaatgttctgaattttcaaaaaatgtactgtgttttcaaaaaatgttcttcaaattcagaaaatatttctgtttttttcaaaaaaaatgttagggattttcaaaaaatgttcttcaaattcagaaaatgtttctgtttttaagaataatgttcttcaggttgttacggctggagatagataggccaaggctattagtcggctgttagctagtttattttctctctatctcctgtaacggtataccttatctcttcctccccaagtcatgatcaactatctataagaaagtacaataaagttgaatgagttgtctataaaaaataaagtagtatattttttttagttggagaaaagagaagaggagagagaaattaagagggttcttagttaagagtgagctctaacacgtgctcttaggcactttataagagagtgaaaggtgggtcatataataaaaatgtattatatattgctaatcaactattgtacatgttgacaataagatgatttataaatgacatgacaatgacatatactcaacagctggctatactattaaccatgctctaacgtgtcagatttgccatgcatgtagatgctcttacatgactttagcacggtgtgaatggcttggaccctggtaccgtgctcaacattaatccccatcgcgtcagtccagcagcggccaacctctggtgcagtgcacatgaccggatcagcggccacggccctgtttggatactctaactcggttacaggttagagttagattctaatcctggactaaccctgaactaactctaatcaaagagtgtttggatggtacagttagattgtcaataaatgcacctttttcaatcatttggctcttttaatgaggatttggtgtggtggaggtagaggaaaaagtaactttttgtgggtcctacctcattctaatccaaataagcacctcttgggtgggttagttcttttggatcggttagatgcatctaaccaactctaaccctcctgtctggatgttttgggattagttcagtccaatctaaccaactctaactctaatccatggatccaaacagggcctatgtctcggcccggtcggttggtagcgaaattaaaagcctttgtgctgttcacaacgtttatctcttccttgcacaaaacaaacaatcattggctttgtttggattcatgggttagtattagacttatgttgtatgtaatattatgtatttgaggttttttactttaaagtattcaaatgtggaatttattatctaaaatactcacgacacgggcgtttgaaggactagatttataagatccggctatagatgctcttaatcccacggcgtcggtccagcagccaccagcctgtggtgcactgcacatgaccggttggtggcaaaattaaaagcctttatgttgcacacaacgtttatctcttcctaacaccgagcaaacaatcattgatctgaacccatctcatcttctccacaagaaatacactccgagaagaggccttggtaggaacagcacacacacgaaaacccaagtctgctttcgggttcatctgcttcttgacacacaaaaaatcaaaataaataatagatttttttttaaattttattctttttctgtggtagataatttgatatgtgaggttcgttttaacttttaacttatttggagatctgagcagctctcgataaaaaaaaacaaattgggtcaaaacagttcatgaacaactaaccttttttacaaaccctgatttttttttttgctaagagctgctcacgcatcaaattatctgccacataaaaagacttttaaaattttctactatttgttttgattttttctgaccgggagtagatgagcccgggactgttcagatgtctaaataaattaaaatttgaagcagatctcacgcatcaaattatctatcatatatatatttttaattttttctactattcgtcttgattttttttcatcaatgcggatgcaactgagctcggaagccaaatcgccgcttccacacatacaccagctttcttcctcaccacactaccgcattttgaggtgtaattattttgtttacaggttgggtccagtgggggctagactctgtgacccgtttaattcgagctgcagttctgccgacagcaacgcgtgatgccacagttgcattgagcagtgaaagtgaaaggcgtggacactgttggccgtcgtgctctactttacatgacttcgccagtgtgaatggcttggacactgcactggtagtaccgtgctcaactttaatccccagcgcatctgtgctagtgtggaggcgtgtctacgcccggtcggttggtggcggaactaaaagcatctgtgctgctcacaacatttatctcttctctagaaacaatcattgatctgaacccagctcatccatcttctccagaagatatacactgccagcagaggccttggtagtaacagcacagagataccagctttcttcctccccacactaccgcaatctcccaagtagagagagagagagagatccagctatggagattgccatgggggctatcggccctgtcctccccaagctcggcgagctgctcatgggtgagctcaccatggagaaacaagtgagaaaggacatcgagtctctcgtgacagagctgaaattgatgcatgccgtcctcagcaaggtggccaaagtgccggcggaccagcttgacgagggtgtcaagatctgggcaggaaaagttaaggagttgtcttaccaaatggaggacatcgttgatgccttcatggtgcgcatggaggatggcggcgagcctgccaacccaaagaacagagttaagaagatagtcaagagagtcaaaaagttattcaagaacggcaaggatcttcatcggatctctgatgctctggaagaagtggttcttcaagctaagcagttgggcgagctgcgtcagaggtacgaactcgtacatgacaccggggttggttctagcattgatcctcgtgtgatggctctgtacaaagatgtgacagagctcgttggaattgaagataccagagatgagttgatcaacatgttgattgggggtgacgattggttgaatcatcccctgaagacgatctccattgttggatttggcgggttgggcaagacaactcttgcaaaagcagcatatgacaagatcaaagtgcattttaattgtgatgcatttgtttcggtttctcaaaatccggacgtaaagaaagttttcaagaatattctctatgaacttgacaagcacaagtatgcacacattcgtagcgaagactgggaagaaagacatctcattgatgagctcgtggaattccttaatggcaagaggtatatatgtttttttcctcttacaactcgatgaccatttagtaaaatcatgagactttttgcatagtatatatgtatttacacatcatatcattgatccactatatatagttttctagtgttcatataaattggtcaagttttctctgctgaattttcacttggatgtcatataataattgttatgaagatctaaaggtttttcttccttgattgaaagatggttcaccaaattactggctagacgtcttgtgttggggtttacttgctggatgctttgtgttggattttctagcacaacggtccttttctggttaatttattacgtacttctaatatacgatgtcacattgggatattttttgttacatacgtaattttttcctgtgatagttgtttgatttcttttccctattttggatgcttgcagtataagtttaaaattgaaagggagatgtcgtaaagcaaaacttgattgatttttattagaatattttttgtgcatttgaaatgtatcggacaagcacttagtttgaaaaattaaatacttaactcgcacatttccaatactagatgttatataatgttgatatatttggcacaaatgttttccctgtgacagttgtttcagggttttccctaatatgagtacttgagaagttgaaatacacgtcaaaattatacataatgccaaaatgaaactttgttgaaatttaatttagtattcttatccttttaagatagttggagtgtgcatacataccttagcatgcccatagtaaaaatagttaggcataacttgacccgtgcaatcaatctaatcagaaacagactagatgcatgcacatattcaccacgtccaagctaaggcaaaaaaaggtatattgtttggttttatgtacataatgacgggtagattgagcacacaatgaaaaaaaatggaagaccacaagccttataaaaacttgaaataacttggataatataatttgccttaacatggcaacttctggaaatcttgtattgtgcttttatatattattttacatatcttcattgtactgatcagttgactaattattaaatttactcacaaaggtacctcatcgtaattgatgatatatggagtggagaagcatgggagttaattcagtgtgctttctccaagaagagtcccgggagccgactaattacaacaacccgcatttttggtgtctctaaagcatgttgctcttcgaaggatgatatttacagaatggaacccctttctgatgatgtatcaagaagacttttctgtaaaagagttttttctaatgaggaaggctgtcctcaacaattgttgcaagtatcccaagacattttgaagaaatgtggcggcataccattagctattattactgtagcaagtcttctagctaataagcatgagataaaagaaaagcaccaatggtatgctttgctcagctcaattggtcatggacttacagaagatcgcagtttggagcagatgaaaaagatattattattcagctactatgatctaccttcgcatctgaaaccttgtttgttatatcttagcattttcctagaagatcaagtgattgtgagagatagactgatatggagatggatatcagaaggatttgtttatagtgaaaagcaagatattagcttatatgaactcggtgatagctacttcaatgagctagtaaacagaagtatgatccagcccataggcattgataatgaaggaaatgtaaatgcttgccgtgtacatgacatggtgcttgacctcatatgctcattgtcaagtgaagaaaactttgtaatgatattggatggcaccagaagaaaaatgcctaagtcagatatcaaggttcgcagattgtccattcaaaatagcaagatagatgtgggtaccactaggatggagcatgtgagatctgttactgttttctcagataatgttgttggagaagtgttggatatttcaagatgtcaagttctgcgtgtgttggatttagaaggttgtgatgtctcagatgttggttatgtggggaaactattacatttgaggtatttggggctacaagatactcatgttgaggaccttcccatggaaatagggaagctgcagtttttgcttaccctggacttaagaggtactgagataacagtactgccatcgagtgttgttcagataagacgtctaatgtgcctgtatgttgattatgatatgaagctgccatctggaatacgtaacctgacttccctagaagtgctagataagctggggttatctgacgcggaccttgattttgtgaaagaattgggccatctgaccaagctcagggtgctccggcttgacttggatggttttgatgagagcctgggtaaagctttggagaaatccattcgtaatatgtacaaactggacagtctagatgtatttgtcggtggtggactcatcaagtgcccgagcgtagattgggtgccgcctccacaactccgcagattggttttccggtcaagtcaaagttggttcgagacattgccgtcatggattaatccttcatcgcttcctctcctctcctatctggatataacggtgtttgaagtgcgatcggaggccatccagcttcttgggactctgcctgctcttgtttatcttgagatatgtaattattctgcgtacgagaaaggacatgaggtggaagcgcccgtcctttcctctggtgcgttattcccacgtgcgacagactgcctcttctggggtataggtgccgtgccgtctacgtttccacaaggagctgcgccaaggcttgaacaccttctgtttgccttaccagacaagtgggtctcccatgaaagctttgatttgggcatgcggcacctcccttccctggagcgatagatggatgtttataagaaggaagctagcgatgcagaggtggatgaagcggaggctaagctgagggccgcagcggatgaccatcccaaccgccccgcccttcacatcatgaggctaagctgaggtccgcactgccgtgctacgtacatttgttctggtccctttgtgttttcaacaaggttcagtcctcatcttccttcttccttctcttttttcgctttgcaggtagaggagggattgatttaccaggtactgcacgcaggtacgtactacttactccatcaattaattactactagcgcccaactattctttcgtcatttctttagcctgcgtagttcaatcaggtttctaaagcgtagcgttgcggcgtatttaaagcgtcaagaatatttcaatgtgaattccgctttggttcaatcaggtttcagcacaagtcttgttatttatgcatgatgcaaaattacatgtagcatgataaaaatgaaccgacaacccaacagtcatatagatacatgtgccttttttctgtacttggatgacctctgctttctttctttctgaaacattgcactgaagcatttctatgcgtgtctcttccaaatggcatggcaggtagcatagtactcctaggatctagcagatgcccttgacatggattggatcgtgggcgcctccaacaactcctcctgtactctgctgtttgacctgtctcccctctgcatccaaatgaaccttctcattctgtctgcttatgtttgggttctcttcacgcttccgacaactcaagaaccattatgtttgagggcgccttccccatgtgtttcgccctcgatgaaccattatttatgacgcactgcctggctggtttgcttgctctcattccgcattgcactgctttgtttgaagcagctcaatgttttgtgccagattcgtaaactatgatgtccggttcagtttgccgtattgctttgatgatgaaataaccaggcctgtattaagtacatctttgtattgatttacaactggaatttgaatatctcttgtatactaccgtatgccttcgctgtcatctagtaatctgtgagattattggccctgaactgatgcagtgttttctggatgaaataatgattcggtgtcccttcaatgactaccttaattatagatggagcaaatcataagatgtttcttgcttgcgatgatgcaaatcatgcgatgtaatgcacatgaagacccgcttattatcaactcaataagttcatgtagacagatatcatgacagtatcttcttatgttgcccccatcaaacgggaggggcgttttggctcccatgtccaggtgatcccggtgtatagtcgtcggccagcggagggcaccgaagaggagcggtgaattagacatggcgatggattttccatcgatccggtcgacatgtaatacctttctcccccagaaagctagtttcaggcttgtagattccatcttagatgggcatagtggatgcaggttacccatcttcaaggagaaggcagagagcgcggtagctcacatcggcatgcttggagccggacttggtgcagatgaagaatcggcgaactgatctcgtggggaacggggggagaccgccaacgaggaagaggaacagcgagattctgggtgcagtttgtcggggctgatcgggagtgctgcccgctacggggagcaaccgagtgtggccgctgtgcaagctagcaaccaagcaggcaagctgctggatggttagcagtagtgcacgtatgtatacgcctaggctgggctggctagcttctgctaattgtatcgatcacgacgtaaacccggcgtcaacttgccaatggaagaaatcgatcggaagacttatttgatggctatacaggggcgtgtcgctcctgggctttcttattcctttttcgatcttttttgatctggtgtttacatcatgggttacatgggtatataaaggagctagacagccaagagctaacctactcggttcctacatgaaaatactactccgatacatacacatattcacgtcaggtttaatcctaatattcacccccttaaacataacgtccttgatgcgacctggaacccaaacacaattgctgcttctcataaatgttatcatcggcattgccttagccgttcgccgttccttgcagtatttcagggaccgccttcggtgtcgtcggatcgtccgtagctcgatgacaacactcctttttggtcgtgtcttcaatctttacctcttcttcggtgctttgtagactgtccttcggatcattgagggcacatctcttgaacccgagcgagatcaaattttggtctaactttgagttccaagctcttggagcttgcttcaacccgtaaagtgccttcttgagcttgtaaactttctcttcttcgcctttcttctcgcagccgaggggttgttccatgtatacttcttctgtgagatcaccgttgaggaaagcagatttaacgtccatatgatgaaccttccaatcctcttgtgctgccaaagctaggagcactctcaccgtcttgagtcgagcaaccggtgcaaacacctcaccatagtgaactccttgacgttgtacgtagccctttgcaacgagtcttgccttgtacttcacaatggcaccctccgtgtcctttttctcaatcgccttcatctcctcatccatggcgtgcatccaactaggacttttgcttgcctctacgaagttcgtcggctcctcaactccgaacagacatagtccggagtactcgagcgtaactggcttggtgtacttgtagactttcttgagcatcttgtagtgatgaggccccgaggagtccgttgtagcttgcgaatgaggtgacacaaattgtgtcgatggtgatgcacttgaggaagatggctgagtctcgggcgtgtcatcgacatccgcgtcatcggcgtagtcgtcgtgatcatgaccatcatcttgattgtcgtcgtcactatgcgccccgttgtcgatgttgtcgtcaagatctccacccgtgtcgtgcgcttcgttgtcgctatctccttgcgacctatgcacatcgtcgtcagtgtcggcaccatgatgatcactaccattgtggtcaccttggttgggcgtcttgccaaccacctagacgtcctctcccgcatcatcatcagttggaaattcaaccgtgaatatgttaccgtttggagcatcgtcgactgcggcgctccaatttcacgcttggttttcttcaaacacgacgtcacgtgaaatccgtagacgcttggtttgtggatcatagaagcggtatgccttggtgtcagaactcctctcgtatccgatgaacaccatcttggtgctactatcggcaagctttgagaggtgcggctccgccgtcttcacatgtgccacgcacccgaacatccgtagatgagacacattcgtcttacgtccgtaaattgcttcatacggagtcttgccgattatcgccttcgttggagcccggctgagaagatagactgccgtcgagccagcttctcctcaaaaagtccctggcaggttcttgatcttgagtaaactccttgtcatgtcaatgatggttcgattgtgcctttcaatgaccccgttctgctgcggcgtataaggtgccgtgaggaacctttttatgccaatcttctcgcagtagtcgttgaactcgttcgacctaaactctccgccgtgatctgtccgtagagcgcgaaccttcagcttgtgttccatctccgttgcaaccttcagcttcttggacgcttcaaacgcctcatctttagatcataggagaacgacccacatatatctcgagtagtcatctaccacaaggaagaagtacttctttcctccatgagttgccggggtgatcgggccacatagatcaccatggagcagctcgagtgcatcacttgcacgataggtagactgagcagggaacggcttgtggtgccgttttccaaccaagcacccgccacatactcgatcaacatggtcgataaatggcatcccgccggataccatctccatctttgacatcttcttcaaggtgtcgaagttaacgtgtccaaatctagcatgccataaccatgaatcatcatcactcttggcgagccaacactccggttaagattgatcaaggttcaggatatagagcctattctgtgtgcgactaacacgagttagcacgtttcggaggttgtcgaagatcgtcatcactccgttatcgatatccaccttgcatccattctcgtcaagctttccgatagagatgatgttgttgcgaagtcatgggatgtagtacactccggtgagtatgcgatgttcgcatgtgagaccctcgaagaggacagatccttgcccacaaatcttcacatttgaaccatcatcaaacttgactgagccttcaacatcgtattccagctcgaggaatttctccttgcaacccggcatatggttactggcacccgtgtcgagataccacgacgcgttgtgatcccaggatatctttggtgccactttcttctcatgaagtagcaccttccgacttgatttcacaaccaccgtttcagcgagatcacaaacttcggccatcagaagacctagaccttcgtcttcctgctttgccaaatttgccttcatctccctcttgtcaggctccggacaatcctttgtaaagtgacccatctcgttgtagttatagcacttgacctcggacatatccaagtttcgttgcttccgccctttagatcggtcagccttaccatgaccttgtggcttgccttttcctttgccttctccggtttgtccgccgtgcattgcgttgcttcagccttcgttggcatcacgcattcctttgctacttggggactcccaatctgcgcgcgagtacatgagttgctcactacctcctcctttgcctttccgacagccacgagcattctcttcccatgtccgcaggcgtccgatcgcctccgttatggtcatgtcgtcaatgtcataaagctgctcgagcgtgccgatgatgtacgtgaatttgtcagtcattgaactgaaaaatttctccacaatctcggtctcatcgagctttgcaccaagcgcgcggatctcccccaccaaagtagtaagacgcatggcgtagtcgttcaccgattcagtttcctccatctgcaacttgtgaaattggcgcttcagcacttgtgtccgagctttggtgacgcgatcttcttcgatcctcatctccttgagtgtgttccacgcctctcttgccgtctcgaactctgccaatgtcatcagcacggaatccggcacggactgggctatggcggccatggcaccttcgtcggactcgtcatcgacgtcgtcgtccgtgattgcctgccacactcggagggtttgaagaataatcttcatcttcaccgtccacacgccatagttggagtcggtgagcatcgggtactggatggggatgttgcgatgcgcctggacgttggcgccgcccgttcccccaccactggtcgctgacttaccgcccttcttcaccttgtcgccgttcttgttcgccttggaaccgcctttgccagacttaaccgactcagcgtcgctatccgtcatcgtagatcttagatcgtcgaggctctagataccaattgttggcttttgatcgctggatcaaatcacatggaaggacgttacgtgcaagctagcaaccaagcaggcaagctgctggatggttagcagtagtgcacgtatgtatacgctgggctggctagcttctgctaattgtatcgatcacgacgtaaacccggcgtcaacttgccaatggaagaaattgatcggaagacttatttgatggctatacaggggcatgtcgctcctgggctttcttattgctttttcgatctttcttgatctgatgtttacatcgtgggttacataggtatataaagggagcccttttatggtgccctgtactgctacgatggggatggagcagtatacaattatccaccgttgatttcgcgagggtagtttagtcatctttttgttttcaacccatcagctatggtccattcgttgtacttgaaaataaattaatctctctggttgtgccgtcggcggttgctctgcatgtcgtcgacggctgttcgttgaacttgccgtcgtatccctgcatcctcgtgtgttctggccaccaccctccgcacgccgtcagacgcgtcagtgcacatccagccgcgcctcctgccggggcgcacatcgccctcacacgcacggccgtacatggtcgccgcgaaaaagaagaagagaacagaccgcaacatctttccttctctgtcttgtacgatgttagtttttcctgtcgatgtacaactttggaaataggcactgcatctaatttctagacatgacggtcgcgaagcagtcccatcgaagaagaggtgcacgttgggggctgggcaattgtgccacaccgtcggagtgcctggccatgagcatggccgaggaaagggatgccggatcacggatgaagatgagacacaacggtctcggccggcagaggaaggggtcgaggtctcgtcgaagaagaagacgcaggcgcgcgcaacggcttagtggcgacgagcacgacagagaatagggaggcgaccaggtgggcgtaggaatctgaaccgacgggcgcgtcagtgcagccatgcgaggcatgctaacatttctctctccctaaattaccctcacaggacgtctactgctgcacgcggagcggacagttccactgatactggaggcgatgttgctcgcccaggtaagcagtatagatcaattaccacccttagatttggagaatggacggtccttattgattaccgggtacagtaaaagagctcaaaaaaggagctagacagccaagagctaacctacccggttcttacatggaaatactactccgatacatacacatattcacgtcaggtttaatcctaatacgctggtggtggcgccatgtctgattttacagctgacagaatgcataaattttcagttctttgcaagcgttagtgctttgtaaatgattagtgcatgaacaattgttctagcgattctgaaataatatgctaggtgctaaaataatttcagttctgaatgattctgaatttcaatgacaagtgctattgaattaggttcttgcttgtttaatttcttcctgcataataggttcggttatttttttatatattttagttttgagaatctaaatatttaggtgcttagtgcatacctgttgttgcctgtgtcgaaaactgcaagtgtctgaaaactgacttgccctgcttttcacctgatctctgccccatgtagatgtgggtgcccctgctttgatcgaaaacgcattacaaatgattggtactgcccatttattgtcggataagcccactagatcaacttagcgtgacataaacatttccaactatggcaatgaagacaaccagcacaagtacagtcaccatgaggttggtgaccgcaaccatgaggttcagccttgccaaatcacgatccaagcatgccgatgcatggataggtggagccgaggacttcccaacggccatggctggaatgcaaatggccaggatccggggcgataggtggactaggaagatgcttgttatgactcagaccactcgtagagtctgcacttgttgtagagtctgcataggataatggtcagtgtatctgctaaaaacattcagtctgcatttgtagaaattgatccccggggctagatccaaaaacactacaaatgaacgagattatcttgtcaccgcacaatgagcatggaatcagtgggagaagttccattctgcgaggtgaaaggtgaaaacgccatggatagattgagttgttttgctagagctgaaaattcttccgatgtgggttcgagttgggcatttattgcagtgtggagagtgccctgatttccgttgtacacctccaagcgcaaacgacaaggcacatgaacgccgttgctctgtccgtcgcacatgaacgccgttgctctgtctgtctaaaccaacggcaaggaaacgggcatgcagcattaaatgtggaccaatccatgggccctgacactgttctaaaatagattgcccatcgcgaatacgttgctgaataggagtacttttgtccgcttctgagttaaaaactactaccatcaccgcaaaaagaaaaaagttaaaaactactcccttcttccctaaatataagtttatttagagatttcattatgaactacatatacctgtatataaacatactttagagtgtagattcattcatttgttgtgtatgtagcccgtaataaaatctttaaaaatacttatattttgaatgggagggagtaccagtcagaaattcagattaagtacgacattcatttttcctgtgaagtgatgaattgtttctatccccttgatcaagtgcatgctctgtctgtgcgattgtgcgtacccggaatgtgatcggtagatcatttcctgctttcttccctctattggagagtcgagtttcgtcagtactcagttcgtgagatcacttgaatattcatcaccttttgtttgcattcgtttctcattggctttccttgcattttctccagcttacaatctctatcatctttctctttgtctaaaactggaaattgctttataactaagataactagatgatgccccgtgcgttgctgcggaaaatatgataaatagatatataaataggtgttgaaaaacaaaaacgatttgctaaaaaatattaggattgatctcattttatattttaagtataataactcatatggagcatttgacaaaagatgcataaaaaagggtaacatgatctacgtatattttctctaaaatatataccgcttatgcccataacaaaaattagtgaaataatgtgtagattagggcacatattataatataacttatgaccacatgcatgacttgatgatgtggcctggttacatgaagaaaaataagtccttataactaaatgcatgacttgatgatgtggcatggttgcatgagaaggaaaaataggtagtgggttgcaactatttaagaatagaagatgcgagaagacgatgtcatccactttcctgttatttagacctgttgatccacttctctgatatccctcagacctcaacttcatccaagctgtccctgggaccatgtcgggtgaaggtgttggaaatatgccctagaggcaataataaagtggttattatcatatttccttgttcatgataatcctctattgttcatgctataattgtgttaacaggaaacagtaatacatgtgtgaatgaataatagatcacaatgtgtccctagcaagcctctagttggctagctcgttgatcaatagatgatcatggtcatggacattggatgtcattgataacgggatcacatcattaggagaatgatgtgatggacaaggcccaatcctgagcatagcggtagatcgtgttgttcgtaggctaaagtttttataatgtcaaagtgtcttttccttcgaccgtgagattgtgcaactcccggataccgtaggagtgctttgggtgtatcaaacgtcacaacgtaactgggtgactataaaggtacactacgggtacctccgaaagtttctgttgggttggtacgaatcgagatcgggatttgtcactccgtgtgacggagaggtatctgtgggcccactcggtagaacatcatcataatgagctcaatgtgactaaggagttagtcacgggatgatgtgctacggaacgagtaaagagacttgccggtaacgagattgaataaggtatggagataccgacgatcgaatctcgggcaagttctataccggtagacaaagggaatcgtatacgggattgattgaatccttgacatcgtggttcatccgatgagatcatcgtggagcaagtgggagccaccatgggtatccagacgccgctgatggttattggccggagaggtgtctcggtcatgtctgcctgtctgccgaacccgtagggtctacacacttaaggttcgatgacgctagggttatagggaattgttatacgaggttatcaaaagttgttcagagtcccagatgagatcccggacatcacgaggagtttcggattggtccgaaggtgaagattgatatataggatggatgggtttggacaccggaaatgtttcgggcgtcactggtagcgaaccgggaccacccggaccaccggaaatggtcccgggggtccactgggaggggccaccagccccaagaggtagcatgggccaaaaggtggtgggcaaccagcccgcgcctccaccaggaggcccaaggcgcatgaggtggggagagagggggaaaccctggcgcaggtgggccttaggcccaccaggtggtgcgccaccccctcctgccctggccgccccccccctctcccatctggctgccgccaccccctagggagggaaccctagaggtggcgcagccctccccctcctcctataaatagagaggggtttggggctgttggggacacctttttccctctccgtcggtgcggccctgtccctcttcttcctcctctccgtcggtgcttggcgaaggcctgccgggagacctcgtagctccaccgccaccacgccgtcgtgctgccggagctcttccccaacctctccctcctccttgctggttcaaggcgtgggagacgtcaccgggctgcacgtgtgttgaacggggaggtgccgtggttcggcactagattggaatcacgccgcgattcggatcgcaatgagtacgactccatcaaccgcgttcttgcaacgcttccgctgggcgatcttcaaaggtatgaagatgctctcacctctccctcgttgctggtttctacataggaaggtccttgatggcgtaggaatttttttgattttgctacgttacccaagagtggcatccgagccaaggttttctatgcatagattcgtagcacgagtagaacacaaaggttgtgggcgctgatcttgtcaattgcttaccactactagtcttatttctttcccgcggtattgtgagatgaagcggcctggaccgactttacacgtaaccacgtgagactggttccatcgcctgacatgcacatggtgcataaggtggctagcgggtgtctgtctctcccactctagtcggattggatttgatgaaaagggtccttatgaagggtaaatagctttggcatatcaacgttgtggctgtcacgtaggtaagaaagcgttcttgctagaaacctaaatcagccaattaaaacttgcaacaacaattagaggacgtctaacttgtttttgcagggtatgacatatgatgtgatatggccaaagttgtgatgttacatatgtgatgtatgagatgataatgttattgtaataggaatcacgacttgcatgtcgatgagtatgacaaccggcaggagccataggagttgtctaaatttattgtatgagatgcaacgctatgttttcattactttactgcattgctaatagttagctatagtagtagtagtaatagttggcgtagcaactccatggagacacaatgatggagatcatgatgatggtgatcatggtgtcatgccggcgatggtgatgatcatgcgatgccccgaagatggagatcaatggagcaaagatgataatggccatatcatatcattgaatgattgcatgtgatgtttatcatgttttacatcttattgcctagaacgacggtagctaataagatgatccctcataaaatttcgagaacgtattcccctaagtgtgcaccgttgcgaaggatcgttgtctcgaagcacctcgtgatgatcgggtgtgatagattctaacgttcgaatacaacgggtgtaagccagatctacacacgcagaacacttaggttgactcgacgagcctagcatgtacagacatggcctcgaatacgagagaccgaaaggtcgaacatgagtcgtatagttgatacgatcagcatggagatgctcaccatcgatgactagtccgtctcacgtgatgatcagacacgagttagtcgacatggatcatgtaacacttagatgactagagggatgtcgatttaagtgggagttcatacttaatttgactagatgaacttaattattatgaacttagtctaaaagttgtctttacaaatattgtagatccaatggccaacgcacctgtcaacctgaacttcaacgcgttcctagagaaaactaagctgaaagatgatggtagcaactatgcggactgggtccgcatcttgaagctcatcctcattgcatccaagaaggcttatgtccttgaagagccgctaggtgaccctccagttcccgcagcttcccaagatgttctgaacgtctggcaagtgcggagtgatgactactctctggtcaagtgtggcatgttatacagcttagaaccggggctccaaaggcgttttgagcaacatggagcatatgagatgttccaggagctgaaactagtttttcaagctcatgcccgggtcgagagatatgaagtctccgacaagttctttagctgcaagatggaggagaacagttctgttagtgagcatatactcagaatgtctgggttacacggtcgtctgactcaacttggagtcgaacttccggatgatgctgtaattgacagaatcctccagtctctcccaccaagatacaagggttttgtgatgaattacaacaggcaagggatggagaagaccattcccgagttgtactcgatgctcaaatctgcagaggtagaaatcaagaaagagcatcaagtgttgatggtcaataagaccaccagtttcaagaaaggcaagggtaagaagaacttcaagaaggacggcaaagctattgccgcgcccggtaagccagtttctgggaagaagaagaaaaatggacccgagcctgagactgagtgctactactgcaagggaaccggtcactggaaacggaacagccccaagtacttagcggataagaaggccggcaacgtcaaaggtatatgtgatatacatgttattgatgtgtaccttaccagcgctcgtagtagctcctgggtatttgataccgatgctgttgttcacatttgcaactcaaagcaggaactgcggaataagcggcggttggctaaggacgaggtgacgatgcgcgtcgggaatggttccaatgtcgatgtgatcgctgtcggcacgctacctctacatctaccttcgggattagttttaaaccttcataattgttatttagtaccagctttgagcatggacattgtatcagggtcttgcttaatgcgagacggctactcatttaagtccgagaataatggttgttctatttatatgagtgatatgttctatggtcatgctccgctggtgaatggtttattcctaatgaatctcgatcgtgatgttacacatattcatagtgtgagtaccaaaagatgcaaagttgataatgatagtcccacatacttgtggcactgccaccttggtcatatcggtgtcaaacgcatgaagaagctccatactgatggactattagagtctcttgattttgaatcatttgacacatgcgagtcgtgcctcatgggcaagatgaccaagactccattctcaggagtaatggagcgagcaacccacttattggaaataatacatactgatgtatgcggtccaatgaatgttgaagctcgcggaggctatcgttatgttctcactctcaccgatgatttgagtaggtatggatatatctacttagtgaaacacaagtctgaaacatttgaaaagttcaaagaattttagagtgaggttgagaatcaacgtgccaagaaaataaagtgtctacgatctgatcgtggaggagaatatttgagtcatgagtttggcacacacctaaggaaatgtggaattgtttcacaacttacaccgcctggcacaccgcaatgtaacggagtgtctgaacgtcgtaatcgcactttattagatatggagcgatctatgatgtctctcaccgacttatcgctatcattttggggatacactttggaaactgcagcattcactttaaacagggcaccgtctaaatccgttgagacaacaccgtatgaattatgggttggcaagaaacctaagctgtcgtttctaaaagtttggggttgcgatgcttatgtgaagaaacttgaaccagaaaagccgaacccaaagcggagaaatgcgtattcataggataccctaaggaaactattgggtataccttctatattcgatccgaaggtaaaatctttgttgccaagaacggatcctttctagagaaatagtttctctcgaaagaagtaagtgggaggaaagtagaacaacttgatgaggtagttgtacctcctcttgaaccggagagtagcgcagcacgggaaattgttcctgtggcgcctacaccaactgaagaggaagttaatgatggtgatcatgatacttcagatcaagctgctactgagcctcgaaggtccacaagggtacgctccgcaccagagtggtacggcaatcctatgatggatatcatgttgttagacaatggtgaacctttgaactatgaagaagcgatggcaggctcggattccaacaaatggcttgaggccatgaaatccgagataggatccatgtatgagaacaaagtatggactttggtagacttgcccgatgatcggcgagccataaagaataaatggatctttaagaagaagactgacgcgaacggtaaagtgaccgtttataaagctcgacttgtcgcaaagggttttcgacaaattcaaggagttgactacgatgagactttctctaccatagcgaagcttaagtcagtctgaatcatgttagcaattgccgcttttcatgattatgaaatttggcaaatggacgtcaaaacagcgttccttaacgggtatcttaaggaagagttgtatatgatgcaaccggaaggttttgtggatcccaagagtgctaacaaggcatgcaagccccagcgctccatctatgggctggggcaagcgtctcggagttggaacattcgctttaatgaggtgattaaagcgtttgggttcatacaggtttatggagaagcctgtgtgtacaagaaagtgagtgggagctctgtagattttctcatactatatgtggatgacatattattgatgggaaatgacatagaattattggagagcataaaggcctacttgaataagagtttttcaatgaaggaccttggagaagctgcatacatattaggcatcaagatctatagagatagatcgagacgcctcataggtctttcacaaagtacataccttgacaagatattgaagaagttcaatatggaaaactcgaagaaggggttcttgctagttttgcaaggtatgagattgagtaagactcagtcgccgaccacggcagcagataaagagaacatgagtactatcccctacgcctcagccgtgggctctctaatgtatgccatgctgtgtaccagacctgacatcaaccttgccataagcttggtaggtcggtaccaaagtgatcccggtatggaacactgggcagtggtcaagaatatccttaagtatctgaaaaggactaaggagatgtttctcgtatatggaggtgacgaagagctcgtcgtaaagggttacgccgatgctagctttgacacggatccgatgactctaagtcacagaccggatacgtgtatgttctgaatggtggggcagtgagtaggtgcagcagcaagcaagacatcgtggcagcatctacatgtaaagcggagtacatagctgcttcggaagagggtcatgaagggatctggatgaaggagttcatcaccgaccttggagtggttccaagtgcgtcaggtccgatgacactcttctgtgataatactggagccattgccatagccaaggagcccagatttcacaggaagaccaagcacatccagcgccgctacaactccatccaggaccaggtccagaggggagtgatagatatttgtaaggtacacacggatctgaatattgcagacccgttgactaaacctcttcctcgagcaaaacatgatcaacaccaccatgctatgggtgttcgattcatcacaatgtaactagattattgactctagtgcaagtgggagactgttggaaatatgctctagaggcaatattaaagtggttattatcatatttccttgttcatgataatcgtctattgttcatgctataattgtattaacaggaaacagtaatacatgtgtgaatgaatagatcacaatgtgtccctagcaagcctctagttggctagctcgttgatcaatagatgatcatggtcatggacattggatgtcatcgataacgggatcacatcattaggagaatgatgtgatggacaaggcccaatcctgagcatagcggtagattgtgttgttcgtacgctaaagcttttctaatgtcaaagtgtcttttccttcgaccgtgagattgtgcaactcccggataccgtaggagtgctttgggtgtatcaaacgtcacaacgtaactgggtgactataaaggtacactacgggtacctccgaaagtatctgttgggttggtacgaatcgagatcgggatttgtcactccgtgtgacggagaggtatctctgggcccactcgatagaacatcatcacaatgagttcaatgtgactaaggagttagtcacgggatgatgtgctacggaacgagtaaagagacttcccagtaacgagattgaacaaggtatggaaataacgacgatcgaatctcgggcaagttctatactggtagacaaagggaatcgtatacgggattgattgaatccttgacatcgtggttcatccgatgagatcatcatggagcaagtgggagccatcatgggtatccagaccccgctgatggttattggccggagaggtgtctcggtcatgtctgcatgtctcccgaacccgtagggtctacacacttaaggttcgatgacactagggttatagggaattgttatacgaggttaccaaaagttgtacggagtcccggatgagatcccggacatcacaaggagttccggattggtccggaggtgaagattgatatataggatggatgggtttggacaccggaaatgtttcgggcgtcaccgatagcgtaccgggaccgctgggaccaccagaaatggtcccgggggggtccatcgggaggggccaccagccccaagaggtagcatgggccaaaaggtggtgggcaaccagcccaaagtggactggtgcgcctccaccaggatgcccaaggcgcatgaggtgggaagagagggggaaaccctagcgcaggtgagccttaggcccaccaggtggtgcgccaccccctcctgccctggccgccgcccccctctcccatctggctgccgccaccccctagggagggaaccctagaggtagcgcagccctccccctcctcctataaatagagaggggtttggggctattggggaaacctttttccctctccgtcggcgcagccctgtccctattctttctcctctccgtcggtgcttggcgaagccctgccgggagacctcgtagctccaccgccaccacgccgtcgtgctgccggagctcttccccaacttctccctcctgcttgctggttcaaggcgtgggagacgtcaccgggctgcacgtgtgttgaacgcggaggtgccgtggttcggcactagatcggaatcatgccgcgattcggatcgcaacgagtacgactccatcaaccgcgttcttgcaacgcttccgctaggcgatcttcaaaggtatgaagatgctctcacccctccctcgttgctggtttctacataggaaggtccttgatggcgtaggaaattttttgattttgctacgttacctgatgacccacaagtataggggatcaatcatagtcctttcgataagtaagagtgtcgaacccaacgaggagcagaaggatctgataagcggttttcagcaaggtaataactgcaagcactgaaagcatcggtaacaagtgatggtgtggtgagatgaaacgtagcaagtaacaagtaacaagtaacaatagtagcaacggtgcagcaaagtggcccaatccctttcgtagcaagggacaagcctggacaaagtcttataggaagtaaagcgctcccgaggacacatgggaaatctgtcaagctaattgtcatcatgttcatatgattcgcgttcgttactttgatagtttgatatgtgggtggaccgacgcttgggtactgcccttacttggacaagcatcccacttatgattaacccctctcgcaagcatccgcaactacgaaagacgaattaagacaacgtctaaccatagcattaaactagtggatccaaatcagccccttacgaagcaacgcatagactggggtttaagcttctgtcactctagcaacccatcatctacttactacttcccaatgccttcctctaggcccaaatatggtgaagtgttatgcagtcgacgttcacataacaccactagaggaaaagacaacatacaacatatcaaaataccgaacgaataccaaattcacatgtctattaatagcaagacttatcccatgtcctcaggaacaaaagtaactactcacaaagcatggatatactcatgaccagagaggtaatgaatatcataatggatctgaatatataatcttccaccaaacaaaccaactagcatctactacaaagagtaatcaacactactagcaaccttacgggtaccaatcggcgtcgcgagacgatgattggttacaagggatgaactagggtttggagaggagatgaggctgatgaagatgttgatggagatgactcccctccgacgagaggagtgttggtgatgatgatggcgacgatttcctcctccgggagggaagtttccccggcaggatcgtcctgccggagctctagattggttctgctcaagttccgcctcgtggcggcggcgcctcctcgaaaaagctccgccctcattttttttcaaacgaaacccttcatatagcagaagaggggagccagtgggccaccagggtgcccacaagccccctagccgtggccaggggggtaggccgcggctaccaggctcatgggcccctggttgctcccctctggcacttcttcggcccagtattttttatatattcgcaaaaaaatccacgttgattttcagggtgtttggagttgcgcagaataggggactcagacttgctccttttccagtccagaattccagctgccggtattctccctctttaggtaaaccttgcaaaataagagagaaaaggcataagtatggtaccacaatgtgtaataacagcccataaagcgataaatatcaacatgaaaggatgatgcaaaatggacgtatcagctcccccaagcttagaccttgcttgtcctcaagcgaaaaccaagatcaataaacatgtccacatgtttagggatagaggtgtcgataaaacataatagggacatgagggcatcatgatcacacatagaacagcaatacatcatatactctcatgcaaaagtgacaattccttcacaaagtaaagtataaatcaaaaaccttaccgagaagtgacaaacaatagtccatagtcaatgaagcaattgcaagttatcataacatcgaaaagagtcaaataggagcttgtaaagcaaatccacatactcaatcatctttttgttttctacaattgttacaactcacgtggtactcatgggatcaaagtttcagtcggacacagagaaagataggggcttatagttttgcctcccaactatttacctcaagggtaaagtcaacaataataattcatgagtacttatctccaaattgacatatgaatatagatctttccctagcatatgacgttcaccaagatgaaggcggaataaggaattggtgttgatcaccatgactctcacaagaacaaaagtaaaagtacaagataggcccttcgcagagggaagtagaggttgtcatgcgcttttgaggtttggatatacgacctcttagtgtaaaggaacgtcactttacattgcctcctgtgataaagaactttattatgcagtctgtcgcttttatgtcttcctcatcacaggttcgtacaaagcttattttccacagattacacatattttagggagcaactttttattgcttgcaccgatgacaacttacttgaaggatcttactcaatccataggtaggtatggtggactctcatggcaaaactgggttgaaggtttatggatgcacaagtagtattcctacttagtgcggaagttttggctaatatgaggtggaagcaatcgtcacatgctatgggatctctagtcatataacattgtttggaaccaagcaaacacaattcattatctacttctaagcatgtaatagtttggtgagtgctcacaattatagataatgtctaagatgatatatttatatgtgaaccactccttccttattacttcttattaattgcaacaatgactagggtctatgttggtctattctcaacaagtttcaatcatcatacttgtcatatgtgaagctaccactttccataagatcatctcatgatctttcatgcttttgttcttttctcatacttttgatcatggcacgaagcaaagcccttgactaagatactcattattatatggctcacaagctcgaatacaacgggggagacacaaagcaaaagactcaaactaaacactaaagacttattccactagagaagaaataaaactgaaaagggaagaactaaaacaaaggtaaaagcgaaagatatgatggtgatacgataccagcgcagctcccccaagcttggcacaagacaagggaattgcccataccaatgcttagttgtcttcctttggtggtgatggtggtggaattgtcttggcctttgattccaagagagctatcaatctttgatttataccttggagatctgcgatatgattctccagcaaaacaacttcacgagtgagggaaatattgcgaacacgagttgtttcacaaaacctcaagagttcaatcaaggatggagacagcaggtggaggtagggttggagaaaatccactccttcaacgtcttcattgttgaacataggttgaacttcatccctaggctggttcttctccttaactttgtccctggcttcgttgacttctactcttttcagatcagcatctacttcttcatggacttgagggggattattctccccaacagattcctgagacacctttgctctaaatctgcggcagaaaacaggctcgaaacgaaaacagaggaaacctgctcgatgcggagatcaaaaccctcgggcgtatatataatgattttttcagaccagaaggagtacttgatacgtctccatcgtatctaattttccaaactcttttgcccttgttttggactctaatttgcatgatttgaatggaactaacccaaactgacgctgttttcagcagaattgccatggtgttgtttttgtgcagaaatgaaagttctcggaacgtcctgaaaatttatgaagaatatttctggaaaatatgaaaaatacatgcgcaaagatccaccggaggggacgggccagtgggccacaagccctgtagccgcggcctccccctggccacggctaccaggcttgtggggcccacgtggctctgctgcccccaattccagcgctatttattccctttcatcccggaaaaaatcaggagagaagagttcatcgtgtttcacgatccagaggtgccgccacatcccgttcttgccctggagggcagatccggagtccgttttgggctccggatcaaggagatcgtcgccatcgtcatcatcaaccttcttccctctccaattccatgaagctcttcatcgtttgtgagtaatctattcgtaggctcgctgggcggtgatgagtaggatgagatctatcatgtaatcgagttagttttgacggggattgatccctagtatccactatgttctgagattgatgttgctactactttgccatgcttaatgcttgtcactagggcccgagtgccatgaattcagatatgaaattattatgttgtcaccaatatatgtgtgttttagatccgatcttgcaagttgtagttacctactatgtgttatgtccggcaaccccggagtgacaataaccggaaccactcccggtgatgaccatagtttgaggagttcatgtgttcaccaagtgctaatgcgttggtccggttctttattaaaaagagaaccttaatatcccgtagtatccatttggaccccgctgccacgggagggatggacaatagatttcatgcaagttcttttccctaagcacgtatgactacacacggaatgcatgcctacatcacattggtgaacgggagctagccacatatctctccgtgttataactgttgcatgatgaatgtcatccgacaaatcaccgatccattgcctacgagtttgtcccgctgctattgttactttctctaccgttactattgttgctgctactgttactcgctgctattgttacttgctctgccgttactactttttctactgttgttacttgctttgctctgctgctgctactgctgttacttgctactgctgctacttgctactgctgttattattgttgttccttgctactactgttaatcgttactctgctaccacctgctacaatacttatctggcgccattgatacttcagttaggaataatctgccgtcaacagattctttcctagcaccgttgctatcatactactttgctgcttataccctgcttgcagatactaatctttcaggtgtggttgagctgacaactcaactgctaatactggagaatatcctttcactcccatcgtgtcgaaccaacaaatttgggttgaatactctaccctcgaaaactgccgcgatcccacacgccattgcaagacaattgctaattgttgagcaacaggaagcagctcttttctggcgccgttgccggggagggatagctatattctctgagtcgcttgggatttatatctgctgatcactatgaagaatctgagagatccaagaaccaaagtcttgccctcaactacgaggggaggtaaggaactgtcatctagctctgcacttgattcaccttcagttatgagtaagtttgcgacaccacctcctgctagaaatcttgatatgtcgcctatgctagatgatgctagagatgctactgctattgatgatgcttatgatgctactatgcttgatgatactatgcctgatactgctagagatgctatgcttgatactgctagagatgctatgcctgatactgccttgcctgatgatgctagagatgctatttttcctgatgatgctatgcttgatactgctagagatactactttgcctgatatgccactaggggtattccttgatgctcatattgctagagttactgccaatgctcgtgatgcttctgaaactgccgatactattgagatagaacctgcttttgctcctgctagatctagctctcctagatatgaattgcctgatatacctgagggttacgttatggagggagagatagctgaggattttcttgcgtgtaaggatgcctatgatgctgagaaattacttctcaagtggaaggaaaaatctctgaacgctaggatgaaatatgacccaaagtttgccacttcacctatctttatcaccgatgaggattatgaattctctgtcgaccctgagataatctttctagtcgaatctgatcctttccacggttatgagtctgagacggtcgtagcccatcttaccaaactacacgatatagccacccttttcactagtgaggagaagatccactactactatatccttaagctgtttcctttctctctaaaggatgacgctaaagcctggttcacttctcttgctcctggatgtgtgagtagtccccaggatatggtctattacttctgtgagaaatatttccctgcccataagaagcaagctgccttgcaggaaatatacaactttgctcaactcaaagaagagagtctcccacaagcttgggggaggctcatccagctacagaatgcttcgcctgatcaccctcttaagaagaatgagatacttgatatcttctataacggacttaccgatgcttctagagaccacctagatagttgtgccggttgtgtttttagggaacgaactatagaacaagctgagattctagtgaataacatcttgatcaacgataatgcttggactattcccgaacctcctcctaagccaactcctaagaaaagaggtattctattcctcagtcccgaagatatgcaagaagccaagaaatctatgcaacaaaaaggcattagatctgaagaagtcaaaaatctaccgcctatcgaagagatccatggtctcgataacccgatacaagtagtagaattgaattctctgcgtagattcaatgagagtgatatttcttttgacaaacctgctatcctatgcttcaatgaatttgacaactttgttgccaaacaatagagtttcattgattatgttagcagacaattggaacaaagtactcttatgcttagtcatttaagtgcttgtgtagacagaaatgtcaatgatctgaagcttctgagtaaacatgcctctatgattactactcaggtagaacaagtacttaaagctcagaatgacttgctcaacgaattaaatgacaactctgtcagagtcattaatagaggaggcaaaatgactcaggaacctttgtatcctgaaggtcatcctaagagaattgatcaagattgtcaaggaattaatgctgatacacccagtcatcctaagaagaagaagaaggatgatagaaacctacacgctagttcaccaaataatgtcacacctcaagaaccaaatgatatttctgcgtctgatgcagaaacacaatctagtgatgaacatgaacctggtgacaatatggacagcgatgttcataatgatgctcaacctagcaatgataaggatgtggagattgaacctacggttaatcctgataacccacaacctaagaaatacgataagaatgacttcactgctagaaatcatggtaaagaaagggagccatgggttcagagacctatgccctttcctcctaagccatccaagaaaaaggatgatgaggattttgagcgctttattgaaatgttgagacccgtctttctgcagatgcggttaattgatatgctcaaaatgtctccatatgccaagtacatgaaagatatcgtgactaataaacggaagataccatatcttgagatctccaccatgctcgccaattacactttcaaaggtggaactcctaagaaacttggtgatcccggtgtgcccactataccttgctccattaaaggaaactacgtaagaactgccttatgtgaccttggagccggtgttagtgttatgcctctctctctttatcgtagacttgaactggataagttgacacccactgaaatctctctgcaaatggccgacaaatcaactgctttccctgtcggcatttgcgaggatgtgcctattgtggttgctaacattactatcttgacggactttgttatcctggatattcctgaggatgatgccatggcgatcattcttggaagaccgttcttaagcactgcaagggctgttatagattgcagcaaaggcaatgtcaccttccatgtcaacggtaatgagcatacagtgcactttccgaagaaacgatatcaagtacattgcatcaatgctatcgaaaaaacttcatcgattcttattgggagctttgaatgccctatacctcgtgttaagatgaagtatgatttgcttgttggggagattcatgtccccattgaggtgacttagtggctatccgacaattctgcgtttccttttgcgatttgaaagagttttgtcattgatcaaccccatcgacggatttctttcgatgctcatgaaatggatgaatcaaggagtcacatacctctgttttaagctttcactttctgttgcttagaaggaaaattatagatttagtttagtttttcctgttttctgttttagcgtcccacagaaaagtaccccgaaaataaaagttctccgatggtcctgaaaatcaaatatgattttttctggaatttttgaaaaatactaggactgagagctggcctggtggccacaccagtgggccacaagccctgtagcagcggcctcccccctggccgcggctaccaagcttgtggggcccacaggcaccccctccactcattctagcacccattctcttctcctacctccagaaaaaatcgtttcgtagctcaaacccatgttcttgctcatttggctgtgattttcgatctccttcctcaaagcaccattctccgaaccgttttggggaaattgctccttggtaagtgactcctccattggtccaattagtttttactctagtgctttatccttcgcttattcttgctaccttggtgaccctgttcttgagcttgaaatgttgattttagctggtcccaagtagttttaacgtgtgatacggtctctaggcactagtaggagtagttgctacaaggtgtggttggtctttattcacttttctcttgaacctcaaaaatttcagcagaagaaattatgttcaggagaaagtttcatggtggttcctcaagtaagaagggtccccgtctttctattagggagcccgatccttatcaactaagggacgcaccggtacaaccatgtgaatggccttccgatgagttcatgatcgaagcaggcttcaaggatgagtttgatacacttgtccgcaatccgggttagaagaattcctctcggataaatgtgaacagtatgctatgctcactgcctctttcgtgcgtagatttaaattttcagttggacgtgactcatccatactgtttgatctgtatgataaatcctacaccatggatttagaggatttcaataggatttgcaagatacccgataggggtagtcctaatgatcctgctaagtcttcggttagagattttgtctctagtataactgttggagaaaccagagacatcacgcaagctaccataggaagcattcatttccctgccttgcactactttgtcctcttcataagtagatgcattaacggtaaggttgaacattgtcacctatgcgcatccgaccttagtatccttaagagcgtagtaacaggtgacagaagcttcaacatgggagctataatagcaaggaggctgaataataatgccatcgatggggatttctttggtgggatttatgctacgcgcttagcaaattttcttggagtacccatccgctcaggagatccccctctccgtacagcctaccttgatcgtgtcgctctgacacgctatcagttcctcaagagggatgaggaatccctcgtttaccggttagtgtttaaccggcagcgtgattttcatattacgcttcctgctcctgccttctttgactttcaggttaaacgaagatattatataaccataggagaagcagaggagtatgagagggaggctgagacttctcgtctccgcgaagcagctattcatgaagtggctgcagcgctcccgtacaacccacactatgattttgggtatcacccggaccgtccttgggagtagaccaagctaggccaaaagcctaagcttgggggagtacgtgtttgcaccaactttacattcatgcttatgctttgaatttgttagtcggtgtttacactttgccactgtattatccatgctagtttattttcgttttcttgttttcttgttttgtgtccttttcagaaaacccaaaaatattttcctttcttcttttgcttgttgggagctttcccgtgtaaatagttttctttttctttgggtcaaggtagaagaccatcattacaatgtttagtggctctcgcatgcatatctgtttatttgttaaagagccatattactttgtctcctcctttgtgtttgcctgcagattcagcttagtccaatgcacgagcactcttattattgttcacatcgttcgatcgtgcaagtgaaaggcaataatgatgatatatgatgaagtgactgagactgaaaaagctggtatgaactcgatctattttgtttttgtaaatatgactggcttgtcgttccacattcagctttgttgtgagagaaccatgtttgcaatgacaacttagagatcatagtttctgatgccatgcttaattagctaggagcttataatggtttgtcttgaatgccaacatagattttgagatgactatgatgtagtatgataggatggtattctcctttgaatgattcaagtggcttgacttggcgcatgttcatgcatgtagttgaaacaaaatcaacatagcctctatgatattcgtgttcatggtgatttatatcctgctcatgcttgcacccaatgttagtcaaactcattgcatcttgatgactgttgtcactctctagttggtcgcttcccaatcttttgctagccttcacttgtactaagcggaatactgcttgtgcatccacttccataaacccaaaagtttttccatgagagtccaccatacctacctatttgcggtatctacctgccgttccaagtaaatttgcatgtgccattctctaaaccttcaagaaataatctgttttgcatgcccgaaccgctcatgtggtgacagggggctattgatatcttccatgttaggcatgttatcctcgacatgtgtttatttactgtcattcatgagaaagggcccggtaattggaatgcccagttccacgcttaaatcgaaaacataactgtaaaacaagactccccccggattgatgttagtatggacggtacccgaggattcggctagccgtggagtgtgattgattggtggtgggggagttaaaactttacttttctgtttgggaaccgcctatagcatgagtagcatggaagatattgaaaactcttggtcattgcgttgacaatgaaagcatgccacccaaaattattatctctgttttcaaagcttgaaatctggcaccactgcaaatcaatgcttccctctgcgaagggcctgtctatttattttcctgttaagtcatcctcttcttataaaagcaccaattagagagcacccctgtcatttttatgctttgcttttgactggtattgagtatgactatgactggatcttcgttgctatgaattacaatgtttagtcagcccttgatctttgaaagtgctctgcatttatgttttgcggtctcagaaagagctagcgagataccacctattcatattgcttcatgcttgttttgattgaaagggctagttgtctaacagctagcaagcaaagatcatggtgcttaatatgaagcacaagtgtggaaatgagatagtagcattgtcccttctctctttttctctcatttttttggtgggctctttgacctctttttttattttttttatttttttcttttggtgggcatctttgacctctttttgtaaatgggcttcgctggcctcttttatttcctcacatgggacaatgctctaccaatgatgatcatcacacttacaactcaaaacttagagcaatgatgactctatatgaaatgccttcggtagtgtaccgtgacaatgatctagcatggcatagacatttaatggaaacatcatgctagctatcttatgatcatgcagtggcaatgtagaagtggtggcacatgtcatggtggtagttgcatggcaatatatctcggaatggctattgaaaatgccatagtaggtaggtgtggtggctgttttgagggaggctatatggtggtttatgtaccggcgaaagttgcacggcactaaagaagatagtaatggtggaaggtgaaagtgcatctaaaccatggactcaacattagtcatgaagaactcatatacttgttgcaagaagtttattagtaatcgaaacaaagcattcaacgcatactcctaggggaagggttggtaggtataaaccatcgcgcgatcccgaccgccactcaaaggatgacaatcaataaactaatcatgctcagacttcatcacatagcggttcaccatacatgcatgctacgggaatcactaacttcaacacaagtatttctagatccacaacaccctactaacataactttaatattaccacaaccacaactcaaaactaattgcaaggaatcaaacttctctaactactcaatgcacatgaaagtggaagtttttgtatccctttggataactacctcttttgagactactttcaaagcatagatcaactgccaaaccacgcaccgccgtgctctaaggatataagtgaagcacatagagcaaaatcaactagctcaaaagatataagagaagcacatgtgagctgaattgcctaacacaaaagatataagtgaagctcgacaaaatcacggtgagtgcatgtctctctctgtaggtgtgcagcaaggatgattgtgacacaacaaaaataaaagactcctaagatacaagacactccaagcaaaacacatatcatgtggtgaataaaaatatagccccaagtaacgttaccgatggattgaagatgaaagaggggatgccttcccggggcatccccaagcttaggctttttgacatccttgaatcatcttggggtgccttgggcatccccaagcttgagctcttgccactctttatctttttgtccataagaacttcacccaaaacttgaaaacttcacaacacgaaacttaaacagaaactcgtgatatcattagtataagaaagcaaattaccacttccttaggtactgtagcaaacttaaattctacttatgctggtgttgggttactatattttcaatcttccatggctagtacccccccgatactatccatagtttcatcaaaataagcaaccaactcaacaaaaacagaatctgttaacagcagaccagtctgtagcaatctgtaaggttcgaatgcttctgttacttcaaaattctgaaaaattacgaaggcctgaagaatttttgtagcaatcagcagcaaaaagaatcaactcaaaatctctcacagaaaaaaaaatgaaaattcttttcgtgagcagaaagtttctgtctcttccagcatgatcaaacgatcatccccaagactaatcataacggttttatttggcacaaacgctaaaaggaaacacaaaaaacacaatcataacataattatgaaagtgtggaaaacacaaaacataaagaaaaaggatagattcgttgggttgcctcccaacaagcgctattgtttaatgcccttagctaggcataaggtgatggaatcacgtatagtcatctttggtgctcaaaccataagtagccctcatcatagattcataaggcattcttattttctttctaggaaaatgctccatgcccttctttagaggaaattgaaatctaatattcccttccttcatatcgatgatagcaccaatagtccttaggaaaggtctaccaagaatgatggggcatgaaggattgcaatctatgtcaagtacaatgaaatccacgggtacatagttcttatttgcaacaataagaacatcatatatccttcccatgggtttcttgacagtagaatccgcaagatgcaaattaagagaacactcttcaatctcatgaaaaccaagaatatcacataaagactttggaatcgcagaaacactagcacccaaatcacataaagcattgcattcatagtttttgattttgattttgatggtaggttcccactcatcataaagctttctaggtatagaaacttctaattcgagtttctcttcaagagatttcatcatcgcatctatgatatgtgcggtaaaagctttgctttggctataagcgtgtggggagtttgcaatggattgcatcaaggaaatacattcaaacaaggagcaactatcataattgaatcccttgaaatccaaagttgtagtttcattactacccatggttttgatttcttctactccactctccacacctttgtcatcaagataggtggactccgaatcgttggggcgtttttcaaccaaagtggattcacatccagccccttcatcaataggtttgacacgcgaaaacaaagattcaagaggagtcataccaagcactttaagatcttcgtgatttgcatcacgagaacgcgcccttttaaaccattcatgcttagcacgtatttgggcgattctttctttgctctcattcatggaaacacgcatagcttttaaagtttcatccaagttgatcttgggaggagcacatctaactttcaaagcatcaatatcacaagacatcctatcaacgctcttagccaaattgtctatttttagtaatttttcctctatggacgcattgaaaaccttttgagagttgatgaactctttgatattactctctaattcagagggtaatttgttgtggtttccataagtattgttgtaggagttgccatagttattagaggagttactaggaaaaggcctaggaacatagtttcctctaaaagcattgttgttgccaaaattattcctaccaacaaaattaacgtccaagctagcgttgctactctcaatccaagaagatagtggcatgtcattaggatctacgggagtatttctactagcaaccaaattcattaactcgtccagcttagcaccaagcgagttaatttcttctatagcgtgtacctttttgctagcaggtgacctttcagtgtgccactgagagtagttggtcatgatactgtctaggagttttgtagcatctcctaacgtgatttccatgaacgttccacctgaggcggagtccaagatattgcgcgaagcaaaattcaaaccagcgtaaaagatttgtataatcatccacaaactcaagccatgagcgggacaattcctaatcattaatttcatcctctcccaagattgtgcaacgtgttcatgatcaagttggttgaaattcatgatatcgttacggagagagataatcttagccggcggaaaatacttggatatgtaagcatctttgcacttattccaagaatcaatactatttttaggcaaagaagaaaaccaagttttttgcacgatctcgtagggagaacggaaaaagcttcaacttaacaacatcattatccacatctttcttcctttgcatatcgcaaagttcaatgaaggtattaagatgggatgcggcttcttcactaggaaggccagaaaattgctctttcataacaagattcagcaaggcagcgttgatttcataagattccgcactagtggcgggagcaatcggagtgctaataaaatcattattattagtactcgagaagtcgcaaagtttggtgttttcagccatgatgacttcaacaagcaaacaagaacacaagcaagcaagaaaaacgggcaaaagaaaacggcaaatggaaacggcaaaagagaaaggcaaatggaaatggcaaatgtgaagtgggggagaggaaaacgagaggcaactggcaaataaaagtaaatgcaagagatgtgtttgtgacacttacttggatatatcttgacttgatctcccctggcgtcagaaatcctccccgacaatggcgcccgaaatccttctgctgctggctacgcctatagggatttccttggcaagtatgcaaaggattcccccgcggccttagagccttgcgttggtgttcccttgaagaggaaagggtgatgtagcacagcggcggtaagtacatcaccctttcctcttcaagggaatgccaacgcaagctcagaaggccgcggggatatcctttgcatatttgccaaggaagtccctataggcatagccagcagcagtcatcatatgacttattatcgtcagcacatttggtacaaccgactaattgacctccttacatgcaagtatcactcctacactgatgactacccatacacatgttaagcacgtgatcatctaaatgacgagatttgagtgaaggatttggaaaaaatctcgagcaccttcactcatacattatggtacaccttgttgtctatatccagattatatattggagaaatttattgtgtacaagtcttatccatccataattcccatggttgttcgttctctagacgttgagaaagattcatttagaccatgagattgaaataagatgttgggaccgaaagttccatatcctagtgccattggacccaccaaacatagttggttgggactcaagaatatcgtgtgatatctccaaggaatcgaacatcttgtcttaatcttttaagtttcatagaaatctggacaccaatatctttagatacatcgaccagatccttactatgtgagatcgtagacaagatttgtgttcatactaggtgtagtagccatcccatcaaagttttcaaaacatacctcactccaaaactccgtcctcaattcggattgcaggctgcaacgctacatccaacaaccattataagataatgttgcttgtgttgtacggatacaaacagattacatagtacacaatatcactctattgctcatcttgcaagtcaaatcatgtgacaacgtgatacgtctccaacgtatcgataatttatgaagtattcatgccaagttttcctatatttagaataattttatacggttttgatgcattatgtttgatttatttagaactaacccgaactcatgccgtttttagcagaattaccacggtgttttttgtgtgcagaaaatgaaagttctcggaatcgcctgaaagttttacatttttttctagaggaaataagcaatattggagtgaagaaccatcataggggagccacctatgggccacaagccaacagggagcgaccccctaggtcacgccctgatagtttatggggccaacatggctccgtttggcgtgattccaacactgaaaaatcccatatataccagaaaccccagaagtaaaaaagagaacttcctctccgctgccgcaactctctgtattgatgaaaaaccagtatggatacgttcgagtaccctgacggagaggggaaatcatatccgatggccatcttcgtcatcccgacggaggccatgacgaggagggagtagttcaccctcggggccgaggttttgtacgagtagctatgtggttaatctctctctctctctctctctctctctctctctctctctctctctctctctctctctctctctctctctctctcgtgttcttgagatgtcatgatcttcatatctcacgggctttgttaatatagttggatcatatggtgtttgccccttgctatttttgtgttgaattgaatctttcactttaagatctccttatgttagattgactatttaggtttgagaatacttgatgtatatgttgcatgcagatacccgtagtgacattggggtattcaagtgattcacttggtatatgttatggcatcaacttgcggattccgatgaccttggggatctatgcataggggttgattgcatgttttcatactatgttctctgatagaaatctttgggtgctccttgaagttctttgtgttggatcgaatatgatagatctgaaattttttgatgcatgtcgcataatttatccatagatacttgaggtgatattggagtatctaggtgacattaggcttgattgatatgtatcatgggtgttattctagtacgaacactagggctgtttgtaacacttataggaatagctcaaaagattgattagaaaaataactttgaggtggttctactacctgcaccaatttcgtcttattgttctccgctagataggaactttggagtgattttttgttacacattgagggatgatcatatgattctattatgttagcattgttgagagattgcactagtgcaagtatgaaccgtaggacttattaccaagcatttatacaatgttttgcttgctgttttacacttgctaccttgctgtttttatattttcagattacaaaaatctatatctactatccatactacacttgtatcaccatctcttcgccgaactagtgcacccatacaatttgccattgtattgggtgtgttggggacacaagagattttttgtttgattgcaggattgtttgggagagaccgtcttcatcctacaccttccacggttcgataaaccttaggtcatccacttgagggaaaattgctactgtcctacaaaactctgcgtttggaggcccaacatagtctacaagaataaagttgtgtagtagacatcacaatctcattgatttttttatgaagtctctaccaatttcaacattccataattaaacatgttgatggaatgggtatttgatggcttcaagatatgcaagtaccagggggagtatcttcctaagttacttctgttcaaaccatcatattatactctttttcctttataagtgtacttttataggttctcatcaaggtttttaatgaggtaatatcaacatgagatcaaaggtcataccttttgttttccccaccgacattttttttaaagtatacattgcatatttattgtcctataaactctatacgttttctcatattgagttaaaagagacaattattatgatatgtcatatcgttttgttcttatatttttcccactgggttttaaaagatttttcagtggcatatcagatcgcactctttttcttttgagatttctcttgaaatttctcatgaaaggtttttaacgaggtgacatatgcaatactttctatttttcctcacggtttttaaagaaaattatacatacattgtgtaaaaatcaatagctaatcatatgacttattatcgtcagtacatttggtacaacagactaaatgacttccttaaatggaaggatcacccctacactgatgattttccatacatgttaagcatgtgatcatctaaactgacgggatttgagatgaaggatttgggaaaaacctcgagcaccttcactcatacattatggtacaccatgttgtctgtatccagattatatattggagaaattgattgtggaaaagtcttatccatcaagaattcccatggttgttcgttctctagacttagagaaagattcctctagaccatgagaatgaaataagatgttgggacctaaagttccatatcctagtgccattggacataccaaacataactggttgggactcaagaatatcgtttcatatctccacggcatcgaacctcttgtcctaatattttaattttcatagagatctggacaccaatatcattagatacatcaattagatccttactatgtcagatcgtagacaagctttatgttcatactaggtgtggtagccatcccatcaaagtcttcgaaacaaaccttattgaatacatccagcgaccattatctccaagataatgttgcttgtgctgtatggatgcaaacatattacatagtacacaatatcactgtattgctcattttgcaagtcaaatcatgtgacaacctcgttgatttgtttattaagtctccaccaatttaaacaatccataaacaagttcatgtaatgggtattcgacggcttaaagatatgcaagtatcagggggggtattttcctgaattagtcctatttgaagcatcatattatactctttttcctttgtaattttacttttacaggttctcatcaaggtttttaatgaggtaatatcaacatgagatcatatgtcataccttttgttttccccaccggtgttttttgaaaagtatacacgacttatttattgtcctttaaactctatgcattttctcatattgagttaatagagacaattattatgagatgtcatatcgttttcttcttatatttctcccactgggtttaaaaagagtttttagtggcatttcagatcacactctttttcttttgagatttctcttgaaatttctcaagaaaggtttttaacgaggtgacatatgcaatactttctatttttctcacagttttttaaagaaaagtatacaaagcatatttattgttctccaaactcataaatgagttttctccttcttcaaaggtttttctcatatgacttatcaaggagacatcaataataatatgttgcatcattttctctttattatttttcccaccgggtttaaaggagttttagcaacaaatctactgtattctcctcatattttcccacggggttttggggagtgactattaagattatatgaaagatttctcaagatggaagatctatatacaagaagctttcaacgatgaaacattgaagaagcggtgttgtacaagggggagtgttataatttataaataaattagcacatgtccattgttaattagcacatgctaattaacgatccatccttagcaacaggtgtgtccaactccaaagagtcatgttccttcctactttctattgttaaaacaaacctattctgtagggatgtctccgaacatgcatcccttcttcatatctatttcagatgtatacatacttgagaatcaataaaaaccaggattaatcattcattcactttcaatctcgttttactttaacagatcgtaagaaaatggtagcactacttgcaaaaaatgagacaggtgaccgcaccttgatgcttcctcccaccaattaatcttgtcatcccctaggagagtgtctccacaagcaaagcacgcctcccgttgaaagggaaaagaacacggcacccgttgcgcaaaactgacgagcacaatcaacgtcatcgttttaattttgttgtcggaaattcatcaataaatagtggcattagtttttctagtgcaccaaatattattcatatccatgcattcttatcccttcaatcaaacaccgcgaggaaacagtcttacaaattagcagcgacattgtcattgtagagtgtagatcaatcaccattcttaaaaattagctggatataaccacttgctccaccatgtactccctccgtttctttttactccgcgtataagatttggtcaaagtcaaacaacataaagtttgaccacatttatatcaaaaaatatgaatatctactatattaaaactatatagtatgaaaataaatctcgtggtgcatctgataatattgatttcatgttgtgaatgttgatatttttttaatataaagttagtcaaactttacaaaacttgactttgaccaaaccttaaggaggtgcgtggtgccaaagttgattaatccaaccaacgtggctgcttgtgcctagacaatgcaaactgagctgtttataataactaaactaatcgcaagtgttcagacgaccatacgcttatcctaacgtgtccgcaaagtcagcacaccgagattggcgccggattgtaatttgactctggcacgacagtccaagcgcggcacctctaggcctttttggccgttcacaacatcgaacacgattgatgattccttgctagggcagctatactaacatagttagctactaatacagccgctgataatgggacccaggcacccaaccctgctgagcgaggcccacaaggcagtgagcctgtgcacatgagttgctcgtggttgataaattaagatcatgcgctatacagagctccactattatttaggacagcaaaacgagcattaattacctcagtgccttctttgcaaccgtagagcgctaccagctacctaccacccaaacacgttctcaacagcgtatagctagagagttcgagcttgccatggagatcgccgtgggggctatcggccctctcctcccaaagctcggtgctctccttgttggtgagttcaccttggagaaacacgtgagaaaaggcatcgagtctcttgtgacagagctcacgctgatgcatgccgccctccaaaaggtggggaaagtgccgccggatcagctcgacgagggggtcaagatatgggcaggaaatgtgaaggagttgtcctatcagatggaggacatcgttgatgctttcatggtgcgtgtggaggatgggggtgagcccgccagcccaaggagtagagtcaagaagatactcaagaagaccatcaaattattcaaaaagggtaaggatctccgttgcatctctaatgctctagaagaagcggttcatcaagctaagcagttggccgagctacgtcaaaggtacgaccaagagatgcgggatgctagcgttgtttctagtgttgaccctcgcatgatggccttgtacaaggatgtgatagagctcgtcggcattgaagaaacacgagacgagttgattaacatgttgattgaaggcgatgattggttgaaacatccgttgaaaacagtctctattgttggatttggtggtttaggaaagacaactctagccaaagcagtatatgacaagatcaaagggcaattcgactgtggtgcttttatctcggtttctcataatcctgacatgaagaaagttttcaagaatattctctgtgaacttgacaagaacaaatatgcacaaattcgcaacgaagaatgggaagaaaagcatctaatcgatgaactcatcgaattcctaagttgcaagaggtacatgtgttttctttccttttgcagactgattgtcatttttatctaaaataatgagattgtttaagactagtgcatatgtatcttgatagcaaattggggatttaaagtttaatacttttcgtgctaattcttgtagttactatgtaacccatattatttcaataattagggagtacatgtattaaatcaatgaccatcaaattcatatgcctaattcaatgatctaggacaattgcatattgctacaattatagttgcacacgactttttctgtctctggagaactatgtctcataatatggaatttcaatgagttataaacatgttttattagtttcatttgaagcaacatatctttatataatactttctttgtcccacaatgtaagacgtttttttgacactagtgtaacgtgtagtgtcaaaaaacgtcttacgctatgggacagaaggagtatatcttagtttctactatatcttcattgtgatttgtttactaattccaaaatgtattcataaaggtacctcatcataattgatgatatatgggatggaaaagtgtgggaattaattaattaactgcgctttctccaagaagagtctaggaagccgaataatcacgacaacccgcatagttaccgtctcggaagcatgttgtttgtctagagatgatgtatataggatgaaacctctttctgacgatgtgtcaagaacactcttctgtaaaagagtgtttcctcatgacaaaggatgtcctcaagaattggtgcaagtatccaaacatattttgaaaaaatgtggcggaataccactagctattattactatagcaagtctccttgctaataatcatcagataaagccaagggaccagtggtatgctttgctcagttccattggtcgtggacttacacaagatcgcaatttggagcagatgaaaaagatattgttattaagttattatgatctaccttcgtatctgaaaccttgtttattatatcttagcatcttccctgaagatcacaagattatgaaaggcaagctaatatggagatggatatctgaaagttttgtttatagtgaaaaagaggaatctaacttatttgagcttggtaacaactacttcaatgagctagtaaatagaggtatggtctagccaattgacattgatgatagagaagataaacaagcatgtcgtgtacatgacatggttcttgatctcatttactcattgtcaagtgaagaaaattttgtcacaatattggatggtaccagaaggaaaatgcctaatctggaaatcaaggttcgcagattgtccatccaaaatagcaagatggatgtggatatttctaggatgacacatatgagatctcttaccgttttcaccaataatgttgtcaggaaagtgttggatatgtcaagttttaaagttctgcgtgtgttggatttggaaggttgtgatatctcagatgttgggtatgtggggaatctattacatttgaggtacttagggctaagatatactcatgttgaggaccttcccgctgaaattgggaagctacaatttttgcttaccttggacttaagaggtactaaaataaaagttctaccatcaagtgttgttcatctaagacgcctgatgtgcctgtatgttgactatcttacgaagctgccatctggaataggtaacttggcttccctagaagtgctagatacaatgatgctgtttgacaaggaccttgatgttgtggaagaattgagccatctaaccaagctcagggtgctccaagtttactgccatgttgatgagagcccagataaatccttaatgggatctcttagtaatctatacaaactggacagtcttgatatatatgttcgtggtggagaaatcaatttcatgagcgaagactgggtgcctcctctacaacttcgtagattggctttctcggtaccgtcgagttggttcaagacactgccgtcatggatcaatccttcatcgctttctctcctcacctatcttgacataaaggtggttgaagtgccattggaggccatcaaacttattggaggccaccaacgcaaggctccaaggctccaaggctagtaccctcaccgatgacaaccataaccttcacgacgttggagaaaggggatgcgtactgtggggagtacgacccctgggatgcgtactgtggggagtacgacccctgggatgacggcggaccgtcaaagatgagcacattgctcgggtatgaatcgtgcacaggcgcgtccgtgatggacagcctgctgaggagcgcgcagagtatgtcaacgtcggaattctcaccgaagtagcgaggaccgtcattgaggcgcaggtcactgaagaggatgccgaggttcgccatagccgcgacgacgacctcgggggaggactagtcgtcggactccccgtctgaatccgcatgacggacggggacgtcaatcctcatcggagatgactcgtcaaagggctgcaccacgggcatgctggcaggtccgggcgcggcgtatccagcggagtacgcgcagggccccgcccagcgtgtaaacccatctggcgccgcgtacggccccacggtgggcgccaaatgtcggtgtaatctcacaacatatgccatgggtaggctaaagaaggtaggaccgaagtggcgatcagtggacgctgggaacgaggttggtacacgcaatgggacgcacggtgtacccaggttcggggctctccgtagagataacacccctaatcctgccggagtaactatgagtggatatgagttacaaagtgctcccggagctgttctgggaaggaagaagtgtagccggaggctgacttctccgcctcctgtggaatgtgtgggtatgtgtgttggtgaaaaatgaggtcccccctgcatgagggggaggcaggggtttttatagtcgcaacccccgccagtaacaagagtaaagaagtacaggtgtgggacctacccggcggcccctactgcttacggggcccgccgggtcaagtctggtcgctggagggacccgccgggtcaagtctggtcgctggagggacccgccgggtcaagtctggtcgcccgagtagccggcaggctgaggggcgccctctccctgtggggcccgccggtcggccaacaggcttcttgcgtgtagttgacgcgaggcacgcgcggggtgctccgccgtcgtcttgtggcctccgtatgggcggagggtacggccgcctccaccgtcgccatgccaagcgtcatgatgaggtggaggttaggtgtggtagcactgtgctaagtgatggatcggaggcggcacaggtcagcggcatggccgccgacgtctgtacctgtctttcatactgttccagtacctttgctgacccgcagccactattacccgtggggccccatctggacctactgtgggacgtgactggggtgccctagccggcccggcgcagggtcgagccggcctaggaaaggccgcctcctccccagccgactggtcgtgccgaggcggcggggatgtagctgccgcctcctccagccggtggggcttgcccagccggccagaagaagaggccgccttcgcctctagccggccaggtcgttccagcatgactacaggacttaggcttatgagggccctggggtgcccatcttgcgaaccggaacacgatgaggtggctcgatgagcctaccccggggttatccccccgacaggattctctctaaaaagtcttatattttggagcagagggagtaggatgactaagatacaatcattaattgttttggctcatctctcagtttggtcggagggatgtcactaaaatggataatttcagaaaataggtaaattcaaaaccacgagtatgctattttgctcgggcgccaacctcgtgaatacaacaacagtaatcttaaatgcttttttaatatatatttttccataaaatatttgccaacgtattcatataaaaatgaaattaacgcacaaaattgcttactaatgctacgcaaaatacaaattttatttatatccatcttattaagaatgggggagtaaatagttggtgctctcaatggtgtatgtgtgtcttaaatagttggtgctctcatttttttttttttacggaaggagtacaaggtataatttcagaataaatgtacaaaccgaaagcggcatctcaattcacaactctggaaatctgaatgatgttacaaacaaatctgtggaaacaaaccaggaaaataattaatggttcatcatgggaaaaatgcatggggtctgccctacaaacttcattgttctttagttgccctcaaggaaaattcagacgtaagtggacagtatgcacgagagccttaagtcgttgcacaagatgatcaaacggcaacagaaatactccctccgttccaaaatgtaagtctttttagagatttcactaaagggctacatacggagcaaaatgattgaatctatgctctaaagtatgtctatatacatccgtatgtagtccctctagtggaacctcttaaaagacttatatttaggaacggagggagtacaattctcttgacagtcttggttggaacggaagcagccacatgggaagtaggaagcggtcgcgggatgtattgaatccatgtcgacgaaatctgttagttgctgccacctacaatgccatgtggaagcacattcatacaggcggttcagttaaatgctgcatatgaaaacagagctcatccaagtacagaaagggcatacatattattttcacattgttaatcctcatgccattatcttgtgctagatagtaacaacacgtagtgctatttgtttgcgcaccacaagaaatcaaaagttcagagctaaggagaaattcttgatatttcttggtactaaaaataggaaggtagggcaaaaagaaaaacagagttcatccaagcatatacagaagggcatagatatgctcagctgtacaagggaaaaccatccaacttttttagaaaaggaggctgagccccggcctctgcatcgagagatgcatacaaccatatattattaacaaaaataagtctccaccgagtacaataagtcttaagtaaataggaaaaaggaaaaagaacgatacaaggcatcgctcatgcccaagccggagatggcaaaaatatatagatgactaaacacctatcctattaacatgacgccatccaagccggtggaagataccctgtgctaccatctcccatcggacacacccagtaaccataggctccctggcgtccacaggagtgagtgatgaccaagtacggatcagtgcggtagccctatgaataacctgcaagaagtgaaaatcgcgttgtctattaaacaccaagtcattcctgcaattccaaattgcccacaacagtgcacaagaccccacgcgaataagtttagcagaatgtacatccacctcatttagccacatcccgaataacgtggttatactgttaggaggagagatgttaaaagcaatatgaagcgaacgccaaaccagtttagccataggacaattaagaaagaggtgttgtatggtttctttatccggacagaaagtgcatctagagttaccattccaattccgcttggcaagattatcttttgttagaattacccctttatgaacaaaccacataaagactttgattctaagagggactttgatcttccaaatatgagccgattttggaattggtgtggaatcgatgagattcagatacatagatttaaccgtgaatattccattactagttaacttccaatatacacggtcaggattgcgagacaggttaacatccatcaaccttctcacaagatgcagccaactgatccatctactaccaataagagatctggggaattgaatattaagaggaatctcgttaagtattgacgcaacggatgcttgttgccgttgtgcaatatggtacagctgcggatattgaaatgctagaggcatctcccctaaccaaatatcttcccagaaactagtcgattcaccattaccaatgatgaacctagttctacggaagaaagcatttttagtccgcatcaaccctctccagaaaggagagtccgttggatgagctgtaacctgagataaggatttgttctgtaagtacttgttcttcaaaatttgtacccacataccttcggtttccgaagatagtctaaacagccatctgctgagtaaacacctatttttgatctctaaattttcaattcctaaacctccctgatccttgggtctacagataatatcccatctagtcagcctatacttggccttaagctcatcactttgccagaagaaccgggatcgataaaaatccagtcttttccgtaccccaacgggaacttcgaagaaggataggagaaacatgggcatactcgttaatactgaattaatcagcactagccgtcctccataagaaagaagcttgcccttccagcaactcaactttttctcaaagcgatcctcgatgcatttccattccttgtttgataatcgtcggtgatgaataggaatccctaaatacgtaaagggcaatttcccagtttcacaactgaacaattgattataagtgtgttgttcaattttggctctaccaaaacagaacacctcacttttattgaagttaattttcagcccagatagctgctcaaacaagcaaagtataagcttcaaattcctagctttgaccagattatgttccataaacagaatggtgtcatcggcatattgcagtatcgaaactcccccatccacaaggtgcgggatgagcccccctatcagatccttatcctttgccctcttaatcataagggccaatatgtcagcaacaatgttgaatagaataggggacattgggtccccttgccggagacccttgagtgtctgaaagaaatgacctacatcctcattaaccttaatcccgaaactaccatttttgatgaaacaatcgacatgctttctccaaagctcatcgaaccccttcatacgaagggtttgcttcaaaaaagaccatttgactttatcataagccttttcaaaatccaccttgaagataacaccgtcaagtttctttgaatggatttcgtgcagtgtttcatgcagcacaacgacaccttcaagaatgttccgcccaggcataaaggttgtttgcgtagattgcactaccgaatgtgccatctttgttaatctatctgttcccaccttcgtgaaatttttgaaactaacgtttagcaaacagattgggcgaaactgctcaatacgggtcgccccctctttctttggtaacagcgtaatagtaccaaaattcaaatgaaagagttgaagctgaccagcatacaaatcatgaaacattgccataagatccttcttgataatatgccaacatttcttgtaaaactcagccggaaacccgtctggcccgggagctttaccattcttcatctccccgatagcctccaacacctctttctccgtaaaaggggctgataataactcattgtcagactctccaacttgaggaatatccgccacttgatgctcgtccatagtcacaaaactatggtcagaagcaccaaataactttttgtaataattagagatatacaattttaggttctcatgacctacaattgttccctcatcttgctcgagctgaatgattctctttttcctatgcttgccatttgcaatcaagtgaaaaaatttagtattattatccccatggacaatcgcccgaactttagctctgctcgcccatttcgattcctcttctctaaggagtactcgaagacgttgttcagcctgattcttcaatgatctctcattaaaatccaggataatagtctcagccttacggtcgagatcgtctataagtttaatgagtctgtcctgctcatccttatagctcccagagacgttcttagcccaaccacgaaggtattgtctaagatgtctaattttgttttgccatcgatcaatgttggatgtcccacccaactctcgattccattcccgagcaaccaaatctagaaacccctcccttgtgaaccagcttagctcaaaggagaaacctaatttgttgcccagatgaatagcactacccgagtccagcaacaaaggtgtgtggtcagaaattgctctctagagcgcacgcaccgttactaggggaaacttctattcccattcagtgctagtaagaatcctgtctagcttttcaaaagtctggttttgaagggagttggcccaagtgaattttctacctgagagttcaatctccctaaggtcgaggctctcaataatagtgttaaacataaatggccatcggccatcaaaattgtctttgttcttttcgtcagctctcctaatgatattgaaatcacctcctatcaaaagtggcaatttctcatcacagatctgaaccagatcagccagaaattcagatttaggctcctgttgagcaaccccatacactgcaacaagagcccattggaatccatccactttggatttaattcggaatttaaccacaaaatcccccagtaccacttcctgaacatgaagggtatcacatcttactccaagtaagatcccaccggatcttcctcttggagggagacaatgccagccaaaatccactcccgcggttaaggaactcaaaaactgggaagtaaaattgtctctcccagtctccatgagcgctataaaatcgaggtgatgctctaacgttgcctcagcaagaaatcttattttagccaagtcccgaagacctctgctattccaaaaaatgcctctcatctttcatcataaaatttcttggcagtcctagcgcgagcactccttctaaccgcggaaaccggatataccttccgtttccaaggccgttttggtttctccagaacctcctggtccatataaccagaagtttggaggtcaaccggcgaagaaagtggctcctcggatcttagctgtaaggtagaaacctctccctcctccaaatcagcggtgatgtctaagttctcacatagagtattcagaccccccagctcattaatagcagaatcattcataggtttaacggcagcaagatttcgaataatgtcaagagccctatctacctctaagtctagaaggtcattaattgatttcgaaatttgcctaccagtatcacccaacgagaccccaatatcagcagcattatcaataatataatgcggagagaaatgcagaatggaattgtctttgttaaaagacatacctgtcgagtattccgcatccctaattcttgcagctcgcattgcacggcccaactgcaagtcatccgcgtctggttgcatctgaatacgctgactggaacgcctgtcctgagtcatgggattcgtgaggcccccaaacgcaacaacatcctcctcagtgatagatgccacctcctgcgcaaccggctccaccatcagactcacctctgacgccgaaataggagctggcacctcctcagtgatagatgccacctcttgcgcaactggctccaccatcggactcacctctgaggccgaaataggagctgacacctccgttgtcgcaagctgaggtaccccagagtcaaacaccactcccgatctgggaaacgtcatgcttaatcttgtggcaggcaaaagaaaaaggaaaaaaaaagacagttgtaatggactgatcgaactagctaggtacagaaaataggctaaaggaaaaatgcttaaatagcgtatagttcggtgctagtgtgctactaactgatggagtacctggttgcatgctttgatgaatcaatccctccacctgaaattggaaacaatgacagaaatgaacaccgaatacataacagtagatgaaagaaaaacaatgcatgtgtaacagaggtagctcatgggcgagtgttgaacctcatcacatgcagcatttgcatcttcctccccctgaatttgaaaaaacaaagagagatgaatgaacatttggcacttgtgaacacaaaaatgtgaataatgcatgttgcatgaaggtggagtaggtgtacctttagcaatgtggcaacattaccaactggacaaattaaggtgcatgccgttgggatgctcctccactgcagccctcactgcagcttctgcttcctccagctcgacgccagttgctttttcacatagaagctcaacctggacatacttcagggaggggaggtgtcccatgccgaaatcaaagtcaccgagggaaatccacacagcggggaagccgaagcggaggagtttaacctttggcatagctccttgtggaaatatagatggcactgccgcaataccaattaagcagcactccgctgcgcatgggaatgcaccagcggtgacgatcgacatttccactgcagggccccctgagaatatagtattgcgtatcagggagagagagcgcagagcgggcaacaacccaaggagacgaatgtcatccggtcgcacttcctccacccatatttccaggtaagaaagtaaaggaagccttgaaggattaatccatgccggcatcatccggaatgcacaggtggttccctgaaactgcaatctatggagctgtgggggaggaacccagccttcacgcatgagatcgacgtgtcgaccgccatctgcacaaatatctagattttgtattgtgtgtaggttacttagggactcaaccagagttttattagtcatgtcattgatacatctccatttaaaccggagcacactcaacttggtcagttggcccagctctttcgcaatgtcttcattgaaattgctggaagataactgacctaccatcaatccggcaagcacttctagggacatgagtttacccattccaaatggcatatttatgtcctcatgaacgtacaaacaaatcaaatgtcgtagacgaacaatactcggcggcagttagttcttttataccactagctcgtctcaagtccaatgtttgcagaaactgcagctttccaatttccagtggaagctcatcaacagatgcatgcatcagccgtatgtacctcaagtgcaataaattcctcatgtacccagaatctgaaatagtacaaccttgtaaatccaagacacgcagaacttgaaaactgcagatattcagctgtactctgtcaataataccatgtgtgaagaaagcaagggatctcacttgtgccatgctggtggtagaaacatccatcttgccattttggatggataatctgcgaaccttgctttgcgagttaggcacttttctctagtaccatcaagtatagtgacaaagttttcttcactggacaaggtacgtatgagatcaagtaccatgtcatgtacaatgcaagcttctaccctttcttcatcatcgatgcctattggctgcatcatacttctatttattagctcactgaagtaactatctcctaactcatataagctagtttcttgtttttcactatgaacaaagccctcggctatccatctccatatcaaatcaactcttaagatcttgaaattttctggaaatatactaagatataataaacatggcttcagatgagatggcaaatcataatagcttaataatattatcttcttcatctcctccaccttgtgatcttctgtaagtccatgaccaattgaactgagcaaatcatgccattgctcttttgtttttgtctaacggttactagctagaagacttgctatggtaattatggctaatggtatcccaccacatttctttaagatgtcttgggatacttgcaacagttcatgagggcaccccttctcgttagaaaatactctattatagaagagccttctggagatatcatcagaaagagaattcattttgtaaatatcatcgctagaagagcaacatgcttcagagacactaagaatgcgagtagtcgtgattactcgacttccaagactattcttggggaaagcacacttgataaaacgccacactttttcaacccatatatcatcaattacaatgaggtacctatttaaatgcttcagatagttagttgataaatcgggtccagatatatctaagaatcttgtttgggtagagaaggcattattaaatgatgggttatctaagcaaaaatgcactagagaacatttcatgaatttgtatgaagattataaacctagtgggtgactaacaatgtgctatgaagatgtttatacacaatacaaaaaataataccatgatttattacgcaacagagaattgatgttggcaggaaaaaaataagctaacatacctcttatggctaaggaattcattattgctcttaagaaattctttcttgctcttcagaaattcattgagttcatcaatgaactgcttttcatcccttgttgcactatgaatgcttgaatacttcttcttgtctaactcatagagaatatccttgaagactttcttcatgtcaggattctgagaaaccgaaacaaaggcaacacaatcaaattgtactttgatctggtcatacactacttttgcaagagtcgtcttgcccagcccaccaaatccaacaacagataccgtcttcagttgactctttaaccaatcatcacccccaattaacatgttgatcaactcatcccgtgcatcttcgatcccaacgagctctgtcacatctgtgtacagagccagcacacaggggtcaacgctgacaccaacgcttgtgtcatgcatctcttgctcatatcttctacgttgctcagccaactgcttagcttgaccgatcacttcttctagagaatcagagattcgatggaggcccctcccattcttgaataacttgatgatattcttgattaacttcttcaatttactctggttggcaggctcaccgtcatcctccacacgcagcatcacggcgtcaaggatgtcctccatttggtaggacaactccttaacctttgctgcccatatcttgaccccctcatcgagctgctctggcgggacttttgccaccttgcggagggcggcgtgcatcaaggttagatctgtgacaagagactccatgccttccctcacacgcttctccaaggtgaactcaccggcgagtaggtcaccaagtttcgtgaggagaggtctaatagccaccatggcgatctccatgtttaagctagcttgaactctctacaccctgttgtggtggtatttgggtggaagggagttgggagagtgcactcttggtttcctgagagataaactagctagaaaagtaggaagaaaccaacggtgactattagtgtgcgcgtcgttgtcttgtgcaaaagaaaaggtagagaaatcaatcaacggtgacctctgtatgcgggaacaataattaacacccatgtgcattgactcaagacagacatggctagttggctggagcaatcaactttggcaccaccggcgaaccaatcccacaccgccgtgtatggggaggaaaaaaaggaaatgacaaatttaaacccatttaaatacggttgtaactgcagagagcaatgaccaccagctctgactaagagattagcaatgaccaccagtgtgccggctgtgtacctggtcatcgtaaaagtacgtgacacgcaaatgagagtacattttcagaagtaaaaaacaatcagaaatcattagaaattgagtgagggagacattagtgtaaacttatacaggtttttgttttgcacaacgtgttgtttgccaatccaaatcatttacctccaggaattgctgcatcagttcaggctaataacactccccatttgttctgccaaatttggacgaacgtgacaaatacaaggcaaccaataaaacaaattgcaaccggtagtccggtacagataaaaggtgaaatgtcaattgattgtataagctgaacgaccatattttcattccacgattctggaaactgctaggaagaaagagacgcaatggatgatcaaagccgtcaaaccaggcaacactgcatcataattacatactctgccttacaaaatgaataaataaataagttcacatattctaccttacaaaagaattaaatggaaaaggaagttcatcataagcaaaatacaagaggcacagcagaaactgaatgtttctacaataagcagaagtgataatagaattcaggcataagtcggagcaatcacaatgagggcttcatgccaaagaagattcaaaatgccaaggaaaattaaccagcaagctgctagcagtacatcataattacacacttccttacagcacaaagaaatggaaaaataagttcatataacaagttaaacacaggaggcgccgctgaaacttgatggttcttgagtcgatagaagagatgatagaattcaggcataagaggatgcaatcacaaggacaggtttatttacttgcagcagaaagacaaatgcagcgttcttcgagtttcaacagcctccactgatgaaacatacaacacaatattctaaatccaacacaggtagtcgacataagcaacactatcaacaatagcacatatagatattgtaagatacctcacttgtgccattgctaattctgatggtggtcatatcggacatgctctttcagatggataatcttcaaatcttgcctttgtaaaaaccactttcactcggtgccatgcaagtggttctcttcacacttggcaaaaacatatgggatcaatcatcatatcatgaatacaataagatgttttcattccttcatcaacattgatgtctattggttgaaccatacttctatttatgatctcattgagtaaatctaccactgagctcaaataggctaatctcttgttttcaatgataaataaagcactcggctacccattatcatatcaagtgaccttgcttaatcttctacaaatatacttagatataagaactaaccatatagatgacaaggaagatcagactattactaagagaagcttgagtctagatcatccctttgacataatctacaagtcaagagcttcttttactatttatttgctacagttcatattgttgttgtgtgtggctcctattgtgttttatctctagtctatcccaacttgcttaagagtaaatattgtgttgtttttatcatctaccttcacatccgttattatatgcaatcatctttttaggagattgcaaaattaagagggactaactgatattgagatggatagccgaaggatttgtgtatcatgtaaaggagaaattggaccaatttgagctaggagagagttgcttcaatgagctcataaacagaagcatgatccaactggtaggcatcaacgatgagaagagcgaaagcttatcgggtccatgacatgatgcttgatctaatatatttgttgcggagagataaaattatgtatggtaacagccaaataacaaggtattcttcgtctgggctatcatctttgtaaatccacaacaattgtgattctcagcccatgcccaagtacctatgcatttgaagtgtttgtaatgattagttggcaagcaagtcaacacgtgcatacgggttcttcataaagagaagacaacaataaattttgaataatgaataatgagctagttatgaagacaaaaaatgaaaaaaaacctaggagataaatatcttataccaagcactataaatttacagtgaatcaccgaaaagtgtaaccagaggccgagttctattggtgcggtgatctctgcaaggtgaaggaggtgactgatatttcagtttggtttggcatgaagtttttcatgtgcgccaattatgaaactgatccacccgaatctatttctgcgtacctcaggcctccggtatgctcccagtcatcaagaacgaatacattgtagatattattgttagctggatatttatgtttttactttttgctgcagtctcctcctcctctttgcatgtactatcgttggatcgacactcagtagccggactgggcggtggccgagctttgtgaaatgggtcgtcgtgcatgggctagtttggacttggaagagcgtcgcgctaaggctgaagcagaggagaaagcagaggagaagagagagtgggaagcgcaccgtgtggagcagagggcttttcttgatgagatgaaaaggaaaaaccaagaagagaaacttcggttggaggaacattacagaaaggagcaagaggcccgtgatgctgttagggagagaaagaaagaaagggctcgtgcggcgcaggcagcagaacaagctggtgatggaaaaggaaaatatccacgctggactcagtagatttattttactgtttccttgaattgttgaaccttaattccagtaccatgtatcttattttcagcacgttttatcttaattgaagctagttgtatgagggcattgtatcttaatttcagcaatttgttttccgccatttgtttgccgccaagtctttcccgcctagtgtttcccgccatttgtttcccgcctcgctctcagccacctataaaaccccctccacactatggtgagatagcaggcagtgtagtccagtagttagcattcctcaagatgtccaattatcctttcgatagaagtttccaccgtggtatgtctcgatgtcttcttaacttagctatcgatttcaagttagacaatagacaagttttatgggacgaactcatcagtagtgacacgctactgaatgaggtcgctcacgcattagctaggaaggggtggcctcgaaggacatatgaggaggtacggaaagaacttttgcggatgcatgaaagatggaataagaaaggcaaggacatacaccgtggaatagaatttcctttttattggattgacgatagcgaggacgaagatgatatcttcatgccgagtaccaaagccaatattggtgcatcgtcgaaggacaagagtgcagcatcgacgacggccaagagtagagcttcgtcgaaggacaagagtgcagcatcgaagacggccaagagtagagcttcgtcgaagggccagagctctgcatcggcgaacgatgacgacgactttatgtaggttttgtatgagccttgcatcttaatgtatcttattttatgtatcttatcttatgtattttatgtatcttatcttaatgtatcttattttatgtatttgtttcccgtcaattgtttcctgtcatcgtcgaatttcaacagtttcatgaacgaactgagcataaaaatagataagtctcatacataagtctcatacataaagtacccataggtctcatgaaatacacataaatatcatacatagaaggtcaagagctgtgcatcaatcacgccgtctccctcgacgctctggtggtgttggaggcgtactccaaccaaacctgtgcactggcctaatattacgagggggtagctcggacccaccctgatcataatctgtatcctgtgtatcctgtgtgggccatggtggaggagtcgaatacatggcggaccacatgtctagctgccctgttggctcctctggttcactcccgaacccggatccggacgcggacgcatcatgatatgcataggatcctggaggagggaccatacctgttggaggtggatggaacgtgaaaccaggagcgggctgtaacatgtagctcgatgagggaggatggggctgtggatgatgccatgccgaactaccagccaggtcgggagggggtggatgctgccatgcccaactaccagcctggtcgggagggggtagatgatgccatgccgaactaccagcctggtcgggagggggtggatgggcagtcggttccaccccctgtacacgtggacgcggatcgtgtcgatgcacggagggacgcggctcgtgtcgatgcacggagggacgtggatgctgatgttgcacaacgtccgaagtgcgggtgcatgtgataactttgtagatatcccttatcctctgctcgagtcgcttgatccatggttgaacctgagacctttgcagaagaggtccagatgacaatgatcgttccaagttcatcacgtccgtatgaagattgtatgtcaattcagcctgaaattgtcgtgcaaattaataagtacgcatgatctattacgtaacaacaagatgaattttgcaaagaaaataaatataaccgcgtgctgccatctcaccccaacgaaagtggaacgtgtgggtctcaggcctccatcggtcaactaagcaagtgagcaaagaaccgtcaatgcttgtgtgtttcgatgtgtcagttgcctcaactagacgtgcgaaaggtagaagtccggaccattttagtctgcatataaaacatgtaaattatgttacttacaatgtacattttttacaaatgcttctaattcacgaataaaacatttacctttgaacccacagtggatgtattctccagtcaaacttcgaagtgcgattgacaagtggtacgagcttctgctcacttaatagcttcccacgatgcttactatcaatctccggattaagaagaaaatggttctccattgctatactaatgaaatatagtaaatatacaatacaatacggagtgcaataaatattagaaacttaaaacatagtggtattagaaacttaaaacatagtggtattagaaacttaaaacatagtgctattacaaacttaaaacatagtgctattacataaatcttaaactcttcagcctcttgcaccccctcttccacgtcctctttggccccctcttcctcctcttcttccccggctgcttcgtccacgcctcgggcctccagtaacgaaagtgggacaattactatccgtatgcccaaattcattacataaaatgcattgtccgcgcgcctccgattcatccatgtcatttcggatgcgctgagactgccgcctccctctactcgtacgcatatgtgcagggtgtggtatatataccctttcagcagggtcaacggtattgaagttacccattgatcggaaacccaacagctcacctgtccaggtattgagaactgcctgcttcaaaaaatatggagacacaaacgagattgcgtcaaggcctagcagcccacaagcagaaagtacatgcgagcaaggtaggtgaagcaactttggtttgttgcacgtgcactcgcacgttggccacaattcatttccaattttcacctcatgcgttctcatcgcatttgcacatccgaatttgttgttagccaagcggacctcgaacctacgctccagatttccaatggcgacaacactgtgtgtctgagctttcttcatctttttatccatgtacttcataaccctttcacaataccgtgtgttaggattgtttgtgatatgctctgcagccttttcacgtctttctctgaaatacttgactgtgccatagaaaatgccctcgacaatcgctgtgagtggcaaagctctgtttcccctgaggacgaaattatatgtttcggccaggttggtagtcatgacaccgtacctcgctccatgtgtgtcatgcaacagagaccacctctccaatggctcatgctctatccactgatcaaaggttttgatcgtcctcgcaagccttctccttgtaccaggtgggtcaaatcctggcaagtcacaaagcccaaccggctcttcctccagggtggcagttccagttgctaattgtgcagctaccgcttcggcatgtgccctgacagcggcatctcttgcagctttcctgtccctaacatgcctttgtgtgcaaagatttagtctgttacgtatcaggtgatacttccattgttggttctgcttgcaaagcttcttgaatagattcatcaggttcttatttctaaactgggaaaagaaatttgcacctagatggcgcatgcaccagcggctctgaatgtcttgccaaggagcttgttcatcaggagcagggtttgataatgtcttgatggcgctgagtatacccggatgcctgtcatgaaggatgcacacattctgcttatctcgcacaactgctattttcaactacctgaaaaaccatgtccaactgggggtgttttcgccctccacaaaagcaaatgcaagtgggacgcattgattttgcccatattgaccaatggctgtgaggatctgacccttgtatttgccagtgagaaaagtgccatctacacatatcaccggtcgacaatgtctgaatgcttcaatacagacaccaaaagagaagaacagccgatgcaacactctaacatttgggaactctggcaggtacaagtcttggatgtcaacataggtgccaggattccggttctacagtgcctgcaggagccgaacaacagagtcatatgcatcaaaatacgaaccgaatctggtctcaagtgccttctgcttagccctccaagccttgccatatgatatgttgtacttcaacctcacgaatacatttttctggatagccttcacttccatcgccttactctccactatctggctataaaacaagcgagcaatcaccgtggaagtaaggttaggatgatcttgagggatacacggaagtacacatttatgattaactatgtcacttatgacccagcttgtgccatacttcggaagatatccatgcacctttgcgggacaaccctggtttctgcataccattgtcaagtttttcggacaagaaacttgagctacaaaaaccctttgagtggacattgcccaattaaggatggcatccttcagagcttctttgttcgggtagagggcacctgtcgcaatgttgttctggtgatactcccacgcagaatcatgaccgtcgttcaccaacattgcagatgaaaagtcctgattctatgatgcaggaataggcacttcatgtgcgttcacttcctcatctgaatcggccgaatcatcggagatatcaccttccatatcttcatcatgcatctggttttgcatctcctcatctatctcgtcagcatccgcctcgccgctgacataatcatccgcatctcccccttctgcctggctactctcgtctgttccgtaaacatcatctccagcatgggagccatgaattgactgcgaatcatgcatcccgtagctgctctgaccagactcatagctaccttcggcttgaggttcagtcacaggctttaccacggggagcagtaaggccacaggattacatgccctacgatcgcaagattttaaccatttcacccactggtcctcccgctctatatgcttcaaataccagaaaatatttgcactggaccgggtccataatgcatgaacaccgacggtgtgtgtttcaatattgaaccctaaacatcgggaaagccattctgtcaactgactaatagaccatgtttcaggggaggacacttgcacctcagtgtactgaaattcactaagatcagctcccatctcatttgttcgaacggaaacaggaccgtaccgcaaacataatgtcactaaatcagacatctggcagttcaacaaggacaaaaattagaacaaggacaaacctacttcactcactaaactaattttttactaatctaccggaggggaactactacactcactaaacttaatttttactactctaccggaggagaactattacactcactaaactaaatttttactattctaccggaggagaactactacactcactaaactaattttttactaatctaccggaagagaactactacactcactaaactaaatttttactaatctaccggaggagaactactacacttactaaactaaatttttactaatctaccggaggagaactactacactcactaaactaaatttttactaatctaccggagaagtactacactcactaaatatttttccacatctatcggacaactaaatatattcaaactactacattcactaaactaattcacagaagtaaaaaataattttacccttgaagcgtgcgcagaaacgaagaacgacgaacgacgaacgacgaacaccgaacacccatagcaagaacaaccgtcaccaccagctccaactccaccaacttcacccacacctccgccaccaccaccactacaaccttctcctcaacctcctccacaacctccaccaccaccaccaaaaatagcttcaaaaaaccaccgcaacgcgaatgagaaggatgattaggcttccctcaaacttacgcaactaaaccacggttcaaaacgtagttttatcggaagatttttcgtgtgggggagaaagagagaaatgagagcaaggagaagaaagggaggaagaagaagatagagaagaagagaagaaagaagaagaagaaagaagaagaagaaagaaggaagggaaggagagagccgttgggggtggctggcccctttcggccaacaggtggccgactggcctcctgtcggccaccaggaggccgactggctggcgcaagccgacagggagccatcgacgtgttctggccagtactcggccgacgcgtggccgactcaactcctgtcggccatctggtggccgactgccacctttcggccactggcaagccgacaagtggcagtcggccactgggaggccgacgttgcaatatatttcaaaattttcaaatagacacaatatttttcaaaaagatttgaaaaaagataatatttaaaaaaaattagcaacttattgcacttaagatgcacacacaccaaccatcactaaaagaacactggatgatagtaacagctaaataataatatcctcttcatttgttgcgcactagcatctcttttttccttaaaaaaaaattggaacagctctgacgagcttactactctgtcttggtctgatattgtttcttcataaagggaggtcagtattgaagcgtgtagtacaagctatctggcaacaaatagactcactagagcagacttaagagtagcttattatacgaccaaattagcactgtaaatctggcgtcgatggccaacatcttgcacttcagaattaagatgcacacaccgagctggccagtacttgaagaaaccagattaaacgatctagaacgctagaagatctatggcgtacgaccagcaatttgcaattaaggtcaatttgcacacctccatgagtttagtcgaagaaaccaatttaatcggatccagatccggaagaaacgaaatatacctcatacttctttatacccttgttctgcgagaaccagcatctgtacgtactcgccgacgaggaggtggccggtggccggtggccggcaggacgttccagccaccggagcatcccagccactctccccctctccaaacaaacaaaagctgtagatataataatcgtggcgagaaggggggctgtaacccacagagtcgctgccgtgttgaccccacaaggtttggtcctatgtgtcacaaggctacagtaaataagtggtacacaaacacaacaacaaccaaggaccaagttgagatctcaaaaggtactgtcatcatgagcttatggcatcaacgtgaactttcaacgagttactaatgaacagtcaatagtcggcatgacatctagtatataaaagcaactccaacggggtgatccatttcgtttacgttcgtctatttggatacgcatggacataaaagacggcccaacgtgtcgatccaaacggacgcgcgtccgcttttcgtccgcctgccgacctatttccggcccaatttcgagcctgatttgggtcggcgcggacacaaagcggacgcggacattccctggcctcccagtcggtggcacattggtcgctctccacccccatctagccatcgcctcgccttgcccctagtcccctcgccgccgccgccaccgtcgcccagtttcggctgcgtcctcccgtaccgcagagcctaccccacgccgcggccagggccgcaacgccgccggggcaccgcagcttccccgaccccaaaccgtcgtcgccggtcagcttcatcgtccacgcctacaagctgttcgacagttggctgatacgtctcaaatgtatctataatttttaatagtttcatgctgttatcttgtcttctttggatgttttatgtaccttttatatcttttttgggactaacttattaattcagtgccaagtgccagttcctgttttttccgtgtttttgactcttttcagatctgattttggaacggagtccaaacggaataaaaatcccaaaatgattttttcccgaacgaaagaagatcagggggcctctgggccaagccaggtgggctccagggagcccacaagctccctcaccgcccccaggggggaggcggcggtgggcaggcttgtggcctccctggccgccccctgacctagatctttggcctatatattcccaaatattccgtaaaaaatcaggaaagcctcgaaaccacttttccgccgccgcaagcttccgtttccgcgagatctcatctggagacccttcccggcgccctgtcggaggggactttggagctggagggcttcttcatcatcatcatcacccctccaatgactcgtgagtagtctacttcagacctacgggtccgtagttagtagctagatggcttcttctctctttcggatcttcaatacgaagttctccatgatcttcatggagatctatccgatgtaatcttctttggcggtgtgtttgtcgagatccgatgaattgtggatttgtgatcagattatctatgatatatatttgagtccttgctgattttttatatgcatgatttgatattcttgtaagtctctccgagtcttgggttttgtttggccaactagatctatgattcttgcaatgggagaagtgcttggttttgggatctgccatgtggtgacctttcccagtgacagaaggggcagcaaggcacacatcaagtagatgccatcaagggtaaaaagatgaggtttttatcattggtttgagattatccctctacatcatgtcatcttgcttaaggcgttactttgttcttatggacttaatacactagatgcatgctggatagcggtcgatgtgtggagtaatagtagtagatgcagaaagtatcggtctacttgtctcggacgtgatgcctatagatataatcattgcatagatatcgtcacgactttgcgcggttctatcaattgctcgacagtaatttgttcacccactgtctacttgctttcatgagagaagccactagtaaacactacggcccccgggtctattcatatccatcatttacatctccgcttttactttactttgttactttgttactttcagttctcacttggcaaacaatctataagggattgacaaccccttcatagcgttgggagcaagcttttgtgtttgtgcaggatcttgagatactcctccactggattgataccttggttctcaaactgagggaaatacttaccaccgctgtgctacatcaccctttccgcttcgagggaacaccaacgcaaggctccaaggccacgggggagatcctttgcatatttgcctaggaagtcccttaaggcatagccgcagcagttcctggtgccgctcttggcgccgttgcaagggaagcatagctgccatcaagaagtatttctggcgcccttaccggggaggagaaatcaagtaagtgtcacaaacacatctcttgcatttacttttatttgccagttgcctctcattttcctctcccccacttcacatttgccgttttcatttgcctttctccttcgccgttttctttcgcctttgccgttttcctttgctggttttcttgcttgcttgtgtgcttgtttgtttgttgaagtcatcatggctgaaaacaccaaactttgcgacttctcgagcactaataataatgactttattagtactccgattgctcccgccactagtgcggaatcgtatgaaatcaacgcagctttgctgaatcttgttatgaaagagcaattctctggccttcctagtgaagatgccgcatcccatcttaatactttcattgaactttgtgatatgcaaaagaagaaagatgtggataatgatgttgttaagttgaagctttttcccttctctctacgagaccgtgcaaaaacttggttttcttctttgcctaaaaatagtatcgattcttggaataagtgcaaagatgcttacatatccaagtattttccgccggctaaaatcatctccttacgtaacgatatcatgaatttcaagcaacttgatcatgaacacgttgcacaatcttgggagaggatgaagcttatgattagaaattgtcccgctcatggcttgagtttgtgggtgattatacaaatcttttacgctggtttgaatttcgcttctcgcaatatcttggactccgcctcaggtggaacgttcatggaaatcacgttaggagacgctacaaaactcctagacaatatcatgaccaactactctcagtggcacactgaaaggtcgcctcctagcaaaaaggtgcacgctatagaagagattaactcgcttagtgctaagatggacgagttgatgaatttgtttgctagtagaaacgctaccgtagatcctaatgacatgccactatcttctttgattgagagtagcaacgctagtttggacgtgaattttgttggtaggaacaattttggcaacaacaatgcttttagaggaaactatgtttctaggccttttcctagtaactcctctaacaattatggcaattcctatgacaacacttatggaaatcccaacaaattaccctctgatttagagagtaatatcaaagagttcatcaactctcaaaagattttcaatgcgtccatagaggaaaaactactcaaaatagacgatttggctaagagcgttgataggatgtcttgtgatattgatgctttgaaagttagatgcgctcctcccaaggtcaacttggatgaaactttgaaagctatgcgtatctccatgaatgagagcaaagaaagaaccgcccaaattcgcgctagacatgaatggtttaaaagggtgcgttctagtgatgcaaatcacgaagatcttaaagtacttggtgtttctcctcttgaatctttgttttcgcgtgtcaaacctacttatggaggggctggatatgaatccactttggttgaaaaacgccccaatgattcggagtccacctatcttgaggacaaaggtgtggagagtggagtagaagaagtcaaaattttgagtagtaatgaaactaccactttggatttcaaggaattcaattatgataattgctccttgtttgaatgcatttctttgatgcaatccattgcaaactctccacacgcttatagccaaaacaaagcctttaccgcgcatatcgtagatgctatgatgaaatctcttcaagagaagctcgaactagaagtctctatacctagaaaacttcatgatgagtgggaacctaccatcaaaatcaagatcaaaaactatgagtgcaatgctttgtgtgatttgggtgctagtgtttccgcgattccaaagtctttatgtgatattcttggttttcatgagattgaagagtgttctcttaacttgcatcttgcggattctactgtcaagaaacccatggggaggatcgatgatgttcttattgttgcaaataagaactatgtacccgtggatttcattgtgcttgacatagattgcaatccttcatgtcccattattcttggtagacctttcctaaggactattggtgctatcatcgatatgaaggaagggaatattagatttcaatttcctttaaaaaagggcatggagcactttcctagaaagaaaataagaatgcattatgaatctatgatgagggctacttatggtttgagtaccaaagatgactatacgtgattccatcatattatgcctagctaagggcgttaaacaaaagcgcttgttgggaggcaacccaacgaatctatcctttttctttctgttttgtgttttccacactttcataattctgttatgattgtgtttttgtgtttctttttgcgtttgtgccaagcaaaaccgttatgattagtcttggggatgatcgtttggtcatgctggaaaagtcagaaactttatgctcacgaaaataattttcattttttttctgtaagagcttttgagttgattccgtttgcttctgatttctacacaaattctttagactgtcgtaaatgttcagaatttttgaagtacaagaggtatacgaaatatacagagtgctacagactggtctgctgttaacagattctgtttttgttgtgttggttgcttattttgatgaaactatggatagtattgggggtattagccatggaagattgaaaatacagtaacccaacatcagcacaagtagaatctatgttttctacagtacctaaggaagtggtggtttgctttcttgtactaatgttatcacgagtttctgtttaagtttcgtgttgtgaagttttcaagttttgggtgaagttcttatagacaaagagataaagagtggcaagagctcaagcttggggatgcccaaggcaccccaagagattcaaggatgccataaaagcctaagcttggggatgccccgggaaggcatcccctctctcgtcttcaatccatcggtaatattacttggggctatatttttattcaccacatgttatgtgtttttgcttggagcgtcttgtatcatagagtcttttatttttgttgtgtcacaatcatccttgctgcacacctaaagagagagacatgcatccaccgtgattttgtcgagcttcacttatatcttttggtagacaattcagctcacatgtgcttcacttatatcttttgagctagatacttttgctctttgtgcttcacttatatcttttagagcacagcggtacgtggcttggtagttgatctatgctttgaaagtagtctcaaaaggggtatttatccaaagggatacgaaaacttccaccttcacgtgcattgaatagttagagaagtttgattcatctcaattagttttgagttgtggttatggtaatattgaagtcatgctagtaatgtgttgtggatctagaaatacttgtgttgaagttagtgattcccgtagcatgcacgtatggtgaacctctatgtgatgaaatctgagcatgattagtatattgattgtcatcctttgcgtggcggtcgggatcgcgcgatggtttatacctaccaacccttcccctaggagtatgcgttgaatgctttgtttcgattactaataaaactttagcaacaagtatatgagttcttcatgactaatgttgagtccatggtttagatgcactttcaccttccaccatcactatcttcttagtgccgtgcaactttcgccggtgcacaaaacccaccattagcctccctcaaaacagccaccatacctacctactatggctttttcaaagtcattccgagatatattgccatgcaactaccaccatgacatgtgccaccacgtctacattgccattgcatgatcataagatagctagcatgatgtttccattgatgtctatgccatgctcactactggaattcagaaatttgtcgtctgccaaggcggacggcaaaggatgcaaccacggacggcaaaggctttgccgtctgtcagcagacggcaaagtagacggcaaaaaaaaatccggtgaagaggttctttgccgtctgctttctcaaagcggacggcaaagaatctttgccatgagggggcagacgacaaaataaatgggacggcatatattgcaacgtccccgttaagtgttaacggcaggcctcctctctttgccgtctgccttccccctttgccatgtgggggcagacggcaaagaggggagagagagggggcagattcccccctttgccgtctgccttcccccctttgccatgtgggggcagacggcaaagaggggagagagagggggcagattcccccctttgccgtctgccttaccccctttgccatgtgggggcagacggcaaagaggggagagagagggggtagattcccccctttgtcgtctgctggctgatggcaaagagctttgctattgctcctttttcatttgttttattttatttccctgtattttcataccacaaatatacatacatacatacatacatatacatttcacagtatatatttcaaacatcttcaacacatatatttcacagcatatatatttccaatatcatcatgaaatatttaacaagctagagaacacataggctagcacaatacatagtttcacataattcatctatatatacatacataaattttacattgttcgtcaatacaaataaaaaaactaaacactagcagcccatcaatgtgaggttccatgaaatgaatcaaatctgcaaaaatgggagtaattaagaaagttagaagaagaagaagaaaaaaagactaattattatctgtattcgatttagaactttcaataaaaatactaacatatatgatgcatctaaatagttgcttttaggaagatgtgttcaagtgtaattcaagagtaaaaaatactaacatatatgatgcatcaaaacatattaaattctactagtcaacaacccgtgtaagttcacgggctagaactaatttacatgttattttacatttctgattcataacatttatatcaatcataatttaaagaatcacataattatatctctcagtatagaacaaatttaggacagtaaaactgagcctaatccctatcctctcacgccatgagatgtctggatcgttaacttttctgatcagaccgtttctggtcattcgatctgatctgcgtgccatgtttgtgtttcgtgggctggctgtcctaaggggaggctactcccatggccgaaacgcaatatgctggttgattaggcccaagcgacaagcccattaagcaccgagggatgacgagcgtttgtgcgattccggtgcaggtgcgaaggcgacggttcgagagcgactcccctgttccccccatctacggcgacggcggcacgaacaataggaaccccgcggcgacccccttcgccccagcctcctcatgcagcagcatggacgattgggatcgagctgccgccaacgttcctgggccacttcgtaagttcacggatttcctgctctactcctcacctgatctcactcggttttgaattctaggtgctatgtttgtactctcctaaatgattttgtggacggacctcacgtactcggcaaacaatcctgtgaatgaatcaagaacaagtataatattttcactccgatgttcaatctatcacgatggttcttgatcgactggttagagagatagaaagcaaacagatggtggagaaaagcatgatggagccgaggaacaagcacacctgatcctcgttggtgtgatctaaacacggtctgttgtttcttcttactgagaactacatggacgtcatgacaagtttctccaaaattatttcattgtttatgttgattgatgacagaacaaacactgggattatgggcaaattaatgacgagcatgatccttgcacctcctatttctttgaggtttcctgtcttcacgatcttctcattcatgagaccggtctggagcaattggtcctcctcttttttcttctttattgaatccctaaccattttttccatggttggatcccattatgggtgtgtttaccttgatcatcgcttagtgttttttttctgccagtgtgttctttttgtagcttcaaatgaatggatggctgaagggtgatttaagaaattattacggtggtcacggggacatcaggcaagaggtaactggtttcaagtgcaatttattagactgtttctattgttttatatgaatccatattgtttatgaagaccaacaaaaatgatggcatgatagatagacagtggttggataatgaaagggacatgaatagttaactaattgcttaggacaagccaagttattgcgggatatgtgctccgagcattacaattatttttcttgcggtagcacaatgtccgcacataattttcttcaactgcttgatggaaggaacgcatagggatgtacaaaaacagaggatggtgtgctttactgcatcattgttcttgataaaaatttgatttccatgtttcatgtcttaatttatttctttaaattcctaccatttaccaaatggacgggcgcggcaacgtgcgccatcatggtctagtaagatatattatatctctcggtatagaacaaattagatagagcatttgaagataattttttcgaagctagttatcaacagtatatggtgttcaagcttggaaatctgcctgcataaggtggaaaacataatttatatcattgggttgacccaatcaaactggtagcgaaatgggtcatgctgctgcgttatatggtttgtattgatttctaactgaacaatgatgattctgctaatttctataactcaattcaaaaaagcctagtgagtgcatgatacatcagcacaataaacaaaaattgatactaaattccaagtaattctcaccaaaatggatacatcagcccaaatctttcaaccatttgtctggcgacacgtgagacgtgcatgaagtcgctggatgccccagttgtcacattgtcttgaccaaagatcacctcctcggcaaccctgcaaaagtggttatacatgttagcacacaagacatcactgtgaagaattgcagtaactagtggatgcataaataaataaatacaatttccacaaaaaccgcacctgccaccaagtgccacagccatttggttctctaggtagctcctgctgtacagtccagactcgagcctctcttagcttggagcaaagaacgtgagcgcaccagcctgacctcgaggaatgatggagatcttggcaacagggtcatattcaggcatcagggaaccgacgagggcatgtccagcctctgcaatcagattcgctctctcttaaggctgtcatgccaagcatcattggaaccatctctggttgtgagtatatctgagctaacaaattcattacactgaaatagaaaacaaatgttgacggattagtttcaaaagacgaaagaacagacgtaaatctagtcaagtgtgattcattcatataaaaattcattgagcaaaataaatctcagaccagacaaaattacatagctagaatcaacaccaccagctggacatatttcagaccaggcaaaattacaaaccagacaaaacatttgtcgcaggtcaacgccaccagttggacatattaaccatattaaactttgagaagagttaaccatagtaaactttgagaagagttaaccaaaatatagagtttagctccctttgaacagattataagatcatctgtgttatcattataggtgggcaaatttctgaatctttagtgtcactaaggctgctaaatttttgaccaattgttgagcctaaaaataaaaccatgcttaattcaattatcaaaggaaggtatgaaattaaagattaaagcagaatgtaaaaaaaatggcccgtcaagctcgcaaatattcaagcacaacatcgatcgataagctaaaaaatgctaacggaatttggcagcaatggttgcagcaatattcagttgaatatggcagcacttagaaggaactctacttgagtgttgaaaagagccacaatatttaacttcatttcatcaaaaatatactcttccaagcatgagaagcatagaccacatcgtgtttatcaacctaatgtcttcaaacattcaactatcttatttaataaaatggttaacgaacatgcaccttggcaaagtagtacaatatagaacacttgttactttgcacttatcttgacggtcagaaaaaataagtgcatacttactatttcctgtgattttttcaatagaaaacatgcatgcaaatctgtaaataagaaacaatgtcgacgtattatcacattgtgcagctaagtgtactatgaggtatggactaaaacattatgtaagttggggaactaggtctcctttttgttacaatacggtgtagactgtctcattttagtaaaagacaaactcataaatagttaactcatttaggtatgttcaagtaacctttcttatgagcatatccctatgtgacgtacactccgtggccaatgcaattttcggagtcatgagtagaaaactttatctgaattttttttataagaaagtgcaggaataaatagtccaaagaaaaatataagtacaattttttaaggaaaccatacaatagcgtaacctcataatacaactctgaaaatctaacttgaattctcacccaccgttagtaagcccactcgactgaacatatagtttccagaaaatgtcatattttgtggcagtagggggggggggggtaaagtaaaagacctagaacccatggagtggcaaatcaagtcaataacttagtaaagactcaacgccacctgcgagggcagaagtgcctgtaagtaaagtaatgtaaagttttgacacaaacggttcttaatcccattcgccatcagtacacgattattattttttgcaaaagtttgctgacatacatttttatttagtgtttcaagtgtagcttctaccgcacttccgcgtctgaggccagcgacatggagcagggcatgcagtcctgctggtgcacgcctttctcaacattgtccaatctgacgcctgcataaatcatggattcagtttgataacaatttacttacttctcaacgtgttgaggtaagaataataggatatgaactgttggcatcggataaaacacggtgagattgattactatgtgtgtgagctagtctacataaagaatcaatcaaggggctcgtttccgaagaacaacatctatgtacctcctaactacagctacatgtgtgacctagtctgcaggaagcaccaaccaaccaagccaatggcaatgaggaaacagaccacagagagaaagagaagaatgcatggcaatggtaatctgcacggcattttccaagcaatttatgacttggaaaaaatcatgttgttcatattatatacaacaaaaaaattagattctagaatctatgttatgcatttcagtactaattaacaaagtccctttttcataactatcttagctaaaaaatcataatcagttggttctggtcacccatgtgaagtaaaaatatataaccagttggttttgctaacccatgtggagtgaagacacaatgaaatcgaaggaaatcagcatctctgatttgtttattaagctctgcgtgatcgactactactggagaagaggttgacaatccaattcctactttcctagtggtttgactaagcgcgatactagctattacataccgaaaaaataggggaaatagtctagcagggaagcgaactaacctaggtggagccgtcgacgtggatggggagtcggggacgatgcgtgcgaggacggtgtcgccggcggcggcactccggaagtggttgatactgagctgcatgtcggcgacgcggcggtagcccgatgccatgtgcgcccccatgctggcgaggccatctgctatgagcgcggacacgccaccgtgcagcaccttgaacggctgccggccggccggccaccaacgcacacgcaaacacaaacggcttctttcaatttcagtcagtacacacgtaaaaagaaaaaggaaaaaaatcgcgaggaacggacctagcagcaggtgtccacgacgaggaggcgtccagctccgtcgtcttggtgctcgctgacgccatggtcgtggcgcccaccatggcgccgggccgcgtggccgaggttcggcgggttgactgaccgatcgaggtgcgtatgtgtgcggagaaggtcggctgcgggtgtcgtgcgcaaggaccggatccgggtgaggcggaccggaattggacgaaacggcgacgaatcaaggcgaatctgctcctgcgtcgttgatccaaggagaagagggacggatccatggaggacgcacgcactgtgctcctccatctaggcacgtatccgtggagaagaatcacgaggggtgggggatccatccatcagggggcggagaggagaggcacaggtgtgtggatctgggagagagagaatggggatcaggggtgagggcagatgagggtggggatatggggcgtcggctgttagaacgccgccccctttgccgtccgccttaggatcaagctgacggcaaaggggtcgaggcacacggcaaagaggccctaggctgacggcaaagaggccccccgatggtaaaagggatggcttcagctgcggtgattatttgccgtctgtctggaccatctttaccgtcagccgtgtctttaccctctgcttattctatctttgtcgtccgttagcagacggcaaagaacacactgatggtaaagagtatctttgccatcagccagttctttgccgtctgtttgctgatagctgatggcaaagagtctctttgccatcggccagcagacggcaaagatcaggcagatggcaaatttctggattctagtagtggctagatcattgtcacggtaaattaccgaaggcattccatatagagttatcgttgctctaagttttgagttgtaagtgtgatgatcatcattaatggagcattgtcccatgtgaggaaataaaaagaggccaaagaagcccattttcgaaaagaggccaaagatgcccaccaaaataaataaaaaataaaaaaagaggccaaacagcccaccaaaaaaatgagagaaaaagagagaagggacaatgctaccactttttccacacatgtgcatattatgcaccatgatcttcatgattgagagtctctcgttttgtcaccaccatatagctagtgggaaattttcattatataacttggcttgtatattccaatgataggcttcctcaaaattgccttaggtcttcgtgagcaagcaagttggatggacacccactagttttctttaagagctttcacatactcttagctctagtgcatcatttgtatggcaatccctactcattcacattgatatctattgatgagcatctccacagctcattgatatgcctagttaatgtgactatcttcttttttttgtcttgcaacctccaccatattccacaccatatatagtgctataaccatggctcacgctcatgtattgcgtgagagttgaaaaggtttgagacagtaaaggtgtgaaacaattacttggccaataccggggttgttaatgatttaaattcgttgtgcaatgatgatagagcataaccagactatatgcttttgtagggataactttcttttggccttgttattttgaaagttcatgattaccttgctagtttgcttgaattattattgtttccacgtcaatagcaaactattgatttgaatctaatggatctgaacattcacgtcacataagaggaattacaaagggcatctatgctaggtagcatgaaagcatcaaaaattcattctttatcacttccctactcgaggatgagcaggagttaagcttggggatgcttgatacgtctcaaacgtatctataatttttgatagtttcatgctgttatcttgtcttctttggatgttttatgtaccttttatatcttttttgggactaacttattaattcagtgccaagtgccagttcctgttttttccgtgtttttgactcttttcagatctgattttggaacggagtccaaacgaaataaaaatcccgaaatgattttttcccgaacgaaagaagatcagggggcctctgggccaagccaggtgggctccagggagcccacaagctcccccaccgcccccagggggaggcggcggtgggcaggcttgtggcctccctggccgccccctgacctagatctttggcctatatattcccaaatattccgtaaaaaatcaggggagcctcgaaaccacttttctgccgctgcaagcttccgtttccgcgagatctcatctggagacacttcccggcgccctgccggaggggactttggagctggagggcttcttcatcatcatcatcacccctccaatgactcgtgagtagtctactttagacctacgggtccgtagttagtagctggatggcttcttctctctctcggatcttcaatacaaagttctccatgatcttcatggagatctatccgatgtaatcttctttggcggtgtgtttgtcgagatccgatgaattgtggatttgtgatcagattatctatgatatatatttgagtctttgttgatttcttatatgcatgatttgatatccttgtaagtctctccgagtcttgggttttgtttggccaactagatctatgattcttgcaatgggagaagtgcttggttttgggatctgccatgtggtgacctttcccagtgacagaaggggtagcaaggcacacatcaagtagatgccatcaagggtaaaaagatgaggtttttatcattggtttgagattatccctctacatcatgtcatcttgcttaaggcgttactctgttcttatggacttaatacactagatgcatgctggatagcggtcgatgtgtggagtaatagtagtagatgcagaaagtatcggtctacttgtctcggacgtgatgcctatagatataatcattgcatagatatcgtcacgactttgcgcggttctatcaattgctcgacagtaatttgttcacccactgtctacttgctttcatgagagaagccactagtaaacactacggcccccgggtctatccatatccatcatttacatctccgcttttactttactttgttactttgttactttcagttctcacttggcaaacaatctataagggattgacaaccccttcatagcgttgggagcaagcttttgtgtttgtgcaggatcttgagatactcctccactggattgataccttggttctcaaactgagggaaatacttaccaccgctgtgctacatcaccctttccgcttcgagggaacaccaacacaaggctccaaggccacggggggagatcctttgcatatttgcctaggaagtcccttaaggcatagccgcagcagttcctggtgccgctcttggcgccgttgcaagggaagcatagctgccatcattggcctcgaggtacaaaatggactgtgccgacgagttctttttccataatgttctgtgcgactccgacaattcctcatccgaagatgaggagatgttgtttgccgtgttggtccatgaccacattaataggctgtgcccgctgttctggggctcgattccggggcatgttccaccgctgaatagcaaccaagagagcggctatttccttctatggaaggactactttgacacaatcaatcccctcttcaaacatcagaaattctggcgtcgtttccatatggctaggcatgtcttcaaccggattcgagagggggtggtcagatacagtaactacttcgaatgcaaagaggatgccattggaaggatcggcttctcatcttatcataaatgcactgctgccatttggatgcttgcttatggagtacccagtgatcttatcgatgggtacgtccgtatgagtgagtatacatgcctagaatcgttatacagattcttcaaggttgttattgcagtgtttggtcttgagtatttgagagagccaactgctgcagacacatcccgcttgttggcgaccaatgccagccggagcttcccagggatgcttggcagcatagactggattaactgggtacggaagaactgcccttcagtttggcaaggccagtacaagggccatgttaaggcttgcactgtcatacttgaggccgtggcctctcaagatctctagatctggcattctttctttggcatggtcggatcgcatgataatatcaacgtgcttcaacgatcgccggtgtttgcaaggcttgccgaaggcaacagcccgtcgatcaatgttaacatcaacggtcacaactacaactaatgatattatctagctgacggaatatatccacagcggaccactattgtaaagacaatctccaaccctgtcggagagaagaggaaaagatttacccaggagcaagagagtgctaggaaggatgtcgagcatgcttttggtgttctgcaatctcggtggggcatagttcagtatcctgctagaacttggagcaccaagaagttgtgggaagtgatgactcttgtgtgataatgcacaataagattgtagaggatgagcgcccgggacgtctacacgatcaagggtttaattttcagggtgacaatgtggtgcctcagcatggcggcatcggcggcgctaggggtatgcccctgtattcacaggaatacccaaacttttggtgaaaaaaaatacatctactatctatccatcgctccagaccatccagactccaaccgctgaaccgcatcgtcccgcacggccgcacaggctcaccccgcgccgtccccatcgtcctaccccgcgtcgctgttggaaatatgccctagaggcaataataaattagttattattatatttccttgttcatgataatcgtttattatccatgctataattgtattgattggaaactcaaatacatgtgtggatacatagacaaaacactatccctagtaagcctctagttgactagctcgttgatcaaagatggttaaggtttcctgaccatggacaaggtgttgtcacttgataacgggatcacatcattaggggaatgatgtgatggacaagaccaaactctgaacgtagcatatgatcgtgtaagtttactgctacagttttatgcatgtcaatgtatctgttcctatgaccatgagatcatgtaactccctgacatcggaggaatactttgtgtgtatcaaacttcgcaacgtaactgggtgactataaaggtgcactacgggtatctccaaagatgtttgtggtgttggcatggatcaagactgggatttgtcactccgtgttacggagaggtatctcggggcccactcggtaatgcaacatcacaaacaagccttgcaagcaatgtggctaaagagttagacacgggatcttgtattatggaacgagtaaagagacttgccggtaacgagattgaaataaggtattggataccgacgatcgaatctcgggcaagtaacataccgaaggacaaagggaatggtatacgggattatatgaatccttggcatagtggttcgaccaataagattatcgtagaatatgtaggatccaatatggacatccaggtcccgctattggatattgaccgagaggtgtctcgggtcatgtctacatagttctcgaacccgcaaggtctgtacacttaaggttcggtgacgtttcggtatagttgagttataggtactggtaaccgaagttttgttcggagtcccggatgagatccaggacatcacgaggagttccagaatggtccagaaacaaagattgatatataggaagtcctgttttggtcaccggaaaagtttcgggctcatcggtagtgtaccggagtgccgggaggggtgccggggaccaccgggaggggtgtcacgccccaagggggctcatgggatgtgggaagagataaaccagcccctagtcagctggaataagttcccactaaggcccatgaggtttgagaggaaaaaacccaaaggtggaagaattggaaagggtttccaagtggaaaggaggaatcctactcctagtaggattggagtaggactcctccacctccaattttggccaaaccttgagggtttgaggctgcctcctcccctcccttcctcctatatatagtggtgttttagggctgatttgagataactttttccacgtgcaaatcagatctagacacctctacttcttcgtttctcgtctagatcgcgtttctgcggagcttaggcgaagccctgcaggaatagcaacaccagcaccaccggagcgtcgttaggctgccggtgaactcatcttcctccccgcccctcttgctggatcaacaaggcggagatcatcatcgagctgcacgtgtgctgaacgcggaggtgtcgtccgttcggcgctagatcgggacggatcgcaaggcggttcgtgggacggatcgcgaggctgttcgtggaacggagatttggatctcacgagcgtaccactacatcatccgcgttattaacgcttcccgctgagcgatctacaggggtatgtagatccaatctccctctcatagatgatcatcaccatgataggtcttcttgagcataggaaattttttgtttcccatgctacgttccccaacagtggcatcatgaggtaggttcatgcgtagatgattttctcgagtagatcacaaaggggtttgtgagcgttgatgttttaagttgctgtcctcctttgtattttatcgattcggcggcattgttgaatcgaagcggcccagaccgatagtactcgtaaccacgagagactggtttcaccgttaacatgcaataagattgcatcaaggtgactggtgggtgcctgtttcttcaactttagttgaatcagattagaacgaggcggatcttggagaagatgaaatagcaacttactcatcaccgttgtggtttttgcgtaagtaagatgcgatcatactagatacccatagcagccacgtaaaacaagcaacaacaaattagaggacgtcgaacttgtttttgcagggtatgcttgtgatgtgatatggccaacaacatgatgtgatatattggatgtatgagatgtgtcatgttgtaatagttagatatcgacttgcacgtcgatgctacggcaaccggcaggagccacatggtttcttttaaactaacgtttgtgcttgaagatgtgtttactatattgctaggctgtagcattagtagtaatagcatagatagcacgacaaccatgatggcgacacaatgatggagatcatgatgatggagatcatggtgtggcgccggtgacgatggagatcatgccggtgcttcagtgatggagatcgtgaagcacggagttcatggccatatcatgtcacttatgatttgcatgtgatgttaatccttttatgcaccttgttttgcttagtaacggcggtagcattatgaggtgatctctcagtaaaatttcaagataaaattgtgttctccccaactgtgcaccattgctacagttcgtcgtttcgagacaccacgtgatgatcgggtgtgatagactcaacgttcaaatacaacgggtgcaaaacagttgcacacgcggaacactcgggttaaacttggcgagcctagcatgcccgcgcagaaggtctagtctgctactgctagatggttggatggctggatgtcttatctgctagatggctggatgtcttatctgctagatggttggatgtagaattgtagatgcaagttcattttatctgctagatgcaacttctcttagtcttagtttgagcccagtcctgctcttaggtctatctattttatctgctagatgcaacttttcattattgcttgttttcctaatgtagatgaaaaagagaatgaagagcagcaccatatttgcaatgtgggaaaaggcttcaaagacaaagaaaactcatgaagtatccatactgaatcagacaatggttgcatctagtacttgtatttatcctattcattttgaaagcaatttgcaattggtgttatggcaagaaccggaaagtagaggagaaacatcagcacctcatgaagaagatgatggacaaatgcaagcatatttggaggcactcgaacatgatcctggaaagcggattcccatctcagtgtatgctgtcaatgaccaagatagagttagaaggagatatattgagatggggtcatgtcaaccaaagaatcataagttcaagtttacaaataaaagtggaaaagagcgtcatttttgtcgtgcttggtttaaagaatatccatggattgagtatagtgtggaaaaagatagagctttctgcttcgtttgctatttgttcaaggataaaacaagatgtcccggtggagatgcttttgtgaagaagggatttaataactggaacatgaagtcgagattgaaggaacatgaaggtgatgtttgtagtgctcatgctgaagctcaagagaagtatgataggttcactacaccacaaacatcaattcgggagtctattgcttcaaacacctcacaatacaaggctttgtataaacaatgcttgacatggacactcaagtgtgtgagatttctgttgcgtcaaggcttggcatttagaggacatgatgaaagtgaagactcactaaataaaggaaatttctttgagcttctaaattggctagctggaaattttgaagaggttgacagggttgttctcaagaatgctccacggaactgcaagatgactcaccatgatatacaacaagaggtgataaaatgttgtgcacaagagactactaaactagtcattgaagaacttgatggtggtcattttgcaatacttgcagatgagtctagtgatgtgtatcagaatgaatagttggctgtttgcttgcgttatgttgataagaaaggaagggcggttgtaagatttctcgatcttgctcatgttgaagatactacctctttgacactaaaagctgcaattcagaaaattcttatggactacaatttgacctttgcaatggttcgtgggcaaggatatgatggagctagtaacatgagaggtaatgctaatggcctgaaaaaactgattatggatgagtccccttctgcctactatgttcattgttttgcccatcaactacagttaactcttgttgctgttgctaaggagagtggtgattgtacttggttctttcagcagcttgcacacttgttaaatgctcttggtatgtcttgtaaaaagatgagaatgcttcggatagctcaggctgaagaactcattgatgcattggaattggaagaagtggaaacagggagtgggctgaatcaggaaatgggtttgggaaggccatgtgatacacgttggggctctcacttcaaaactgtgaaccatgtcatctctatgtatggtgcactacgacgagtccttcccaagattggagacgagtaccatggtgcggaggcacaagcggctctatccatagagacaacatttcgatcatttgagtttgttttcatggcacacttgatgcaagaaatatttggatacacagatgagttgtgtagagctttgcaaaagcaagacgaagatattgttcatgctattgagcttgttcgtgacacaaagtattacttggaagttttgaggaccgatgctggatgggatgattttctcacaaaggtcacatctttttgtataaagcataagatcaaagttgttgatatggagggtccttacttacccgttggccggcctagaaggggtttatgtaatggtgtgatcaattaccaccgcttcaaggttgatatatttgtgggtgtcattgataggcaaatcagtgagttgaatggtagatttgatgaggtaaacacggagctactttcttgcatggcagcattttgtccacttcatctatttgctgcttatgaccaagagaagttgattaggcttgctacaaagttttatgcttctgattttacaagtgatgaactggcaagacttggagccttgcgttggtgttcccttgaagaggaaagggtgatgtagcacaacgacggtaagtatttcccttagtttgagaaccaaggtatcaatccagtaggaggatcgcgccaagtcacaagtacctgcacaaacacaaagagcttgtacccaacgctatgaaggggttgtcaatcccttatagattgtttgcaaagtgagaactgaaagcaaaaaagcaaagcaaagtaaaaagtgtaaagctgaaattataattgtgagtagacccgggggccgtagtgttcactagaggcttctctcaagatagcaagtagacggtgggtgaacgaattattgtcaagcaattgatagaaccgcgcaaagtcatgacgatatctaaggcaatgatcatacatataggcatcacgtccgaaacaagtagaccgatactttctgcatctactactattactccacccatcgaccgctatccagcatgcatctagtgtattgagttcataagaacagagtaacgccttaagcaagatgacatgatgtagagggataatctcaaaccaatgatgaaaatcccatctttttacccttgatggaaacaacacgatacgtgcctcgctaccctttttgtcactgggtgaggtcaccgcacggtatgaacccaaaaccaagcacttctcccattgcaagaatcatagatctagttggccaaacaaaacccacaactcgaagagaattacaaggatatcaaatcatgcatataagagatcagtaaggactcaaataaaactcatagataatctgatcataaatccacaattcatcggatctcgacaaacacactgccaaagaggatttcatcagatagatctccatgaagatcatggagaactttgtattgaagatccaagagagagaagaagccatctagctactaactacggacccgtaggtctgaagtagactactcacaagtcattggagaggcaatggtgttgatgtagaagccctccagctccaaagtcccctccggcagggcatcgggaagtgtcaccagatgagatctcgcggaaacggaagcttgcggcggcggaaaagtggtttcgtggacttcctgattttttctgggattttagagaatatataggccaaagacctagggcagcggagcgccaggggggccacgagccaggtagccgccccccctggccgcggctcctgggctcgtggggcccctggggctcccctgccttggctctcaagcctcccgatcttcttctgtttaggaaaaaatcatttcagggattttattccgtgtggactccgtttcaaaatcagatctaaaaagggtcaaaaacacggaaaaaataggaactatcacttggcactgaattaataagttagtcccaaaaaagatataaaaggcatataaaacatccaaagtttgacaagataacaacatgaaaccatcaaaaattatagatacgtttgagacgtatcacccccaaggagcaactccaacgggacgacccatttcgtccgccgccgtccgtttggatccgtgcggacaaatgtgatggctcaaacgcggacacattgccaaaacacgtttgcttcgcgtccgcgccgacccatttccggcccaaattcaggactaaaatgcgtcggtgtggatgcgaagcggacacgcgcgcaccctctcggtgtccgccccaactacccgcggtcaacataattaatgacggtcggcctcagcgggcccacgcgtcagcgactgcggtcggccttttttaatcgagcgcacgctgggttcagcctcatctacttccagccccttgtccccatctcgccacctctctactccctcgccggtgaccaaaccctagccaacacctatggtcggcttcactacaggaaacaacttctttgctgtctgccatagcggacggcaaagggtcactccacggacggcaaagccctttgccatccgccagcaaaatttctacggctgcttgcgtcggtaaagggccttctttgccgtatgcagcagacggcaaagagctttgccatctgtctgacatgacaagtagacgacaaagtatttagacggcagccgacaggcacctattctgttaggtagctaatggagcctttgccgtctgccgttgatggggtctttgccatctaccaggggaggggtctttgccatctgccgagggtggtctttgccatctgccagtgctgggtgtttgccatctgccggggggggggggggggggggctttgccgtctgccgtaggggtctttgtcatctgtcgtggggcagggggtgggtctttgtgcatccgcctttggggtgtctttgccgtctgccaaggggctatttaccgtctggcaaggtcacgagctgatggcaacgtgtttttcttccatgtgaagcaacaacagtaatttgctccaggttccactatcagagatagagaagcaagagcacgaaagttgcacatagtttagaaatcaaaccaaaatcaaagaaaagaaatcattgcccttgcctgaccaacactcatgtagtactaactacagccaatgcaagctccacactatctagtggaagtaaacattgcacattttaagaaaatacaccagctcttgatctttgattgaacgaaataaaataccaaaattatatttaaatattatttcactcacagtgaatcgtccaagataatacatcagttgttgattcttcaaacatgtacaaatgcatctattgtgaatgcacatcacacatggggataagttatgccacacttatcagcaacacaaagcacagcaaacaacacttggtaaaaggtcaagtagagaatatgtatctcattgtccactcctaccaacagtgaacatatgatagactaagggtcattctcacctgatagcaccaggacaaggtgggcctgcttcttagccggtgcctagaggccatcgtgcatgccacaaccgtcattattggcatcatcgttctggacacaaaatccacaaattagtgtcgctgtaggaaatcacatcaggaaagaagagctattccagcacaccatccacaccagaagagctttggaaattatgcagtttctaagattatgtggtattgcaggaacatgcacgtcgatatggtcatagaaaaatacactcacaaaagatatggcatttggaaaataatattcttatatatgatcaattgctcgagatacttcatttcagtcatataaagattagcttcaggaaagctattccagacttattggagaagcaaatttgattagttcagtaccataccaaagcaatgtaaacttcacaacagcgaaagatcacaacagacaaccttctgatgcactacatgctcacaacaactggccgagaaacctacttatgcactacattggttgataacatacaatcaatgccaaactacactgttctagcaacggcatcactgagatatcgcaacggatgaatatgaaacatgtggaacaactgtccgtttgtacaggtacgagtgcaaacatgcacaagtgtctggcaaccattcatcgactattaatctcctggatgaagagatggacgtcaatgcacaagcatagatacaaaatgtaaaaaagaactctcgatcatggccaatcatggtgaaccagcactcaatgaagtaggtacggggaacaaagggtgataaataaacagaagagcatgtatgatcaatccaatctatatcaaggaggaagggaaaaaatgatagatagcatccattccatacaatctaaacaataaaactcatttggatactcatgttctatctacatgatcagcactcaatgaagtaggtctagggaacgaaggaactcacacggtccatgttgaagagcatgaaggagaataagcaaggagaggacgaggatgttgcatcgctttagcagcgatatctttgcttcttcgggcatctaaccagctgcacaacagaaaaatagaattgaaatgagcacatcaaggatgtttgggggttgaatagtgttataagcaagaaaccaacttctttatgtcatggtcaagacatacggacacgaaaaaaatgtcatgatgatttcgctaaatagtacagcaacatcctacgagttgcggtatttttcgcccatatgaagcaacaagagaacaataattttctccaggttccactatcagagatagcagaacaagcacaaagtttaccaactgttggggatattcctaaacagctaacccgccccacctagcgccgggtcagcccagggcacggtttatcctgtgggccgggccttgagcccctggtgatccggagaagagatggcggttcggagttaatatcccggacgtcgacgagacggtggccggcttggaggacacggcgagttagagttacagtcgggcacgggatgtaactcggtcaggactctttgtaaaccctcgggccctgacctataaatataaaggcaggcccctaggggtagggcagacaactaagaatcgagagctagatacggcggcttacgcccctcttgtaatcgaaacaccacagcaataaatcccaagcaggacgtaggctattacctcttcacgaggggccgaacctgggtaaaccttgagtcccgcttccgctcaaacccctttgagtcgccacctaggtgcgatggctccatctacaagtcctttaaccaggacatctgccgtgacaaaaccacgacagttggcgcccatcgtggggcctccgcacggtggagttgagttctcaaagggagcccttccgggctttggaagctacgcggtcggcctcatgactaagagccgccgtggcaagatctacatcgacaactcgccctgggggcctgaggccgattcagtcgaatctggttacagggtccccttcggcaagttccacgtcttcatcggcatggttggggcacgtgtacctgagtcggactccgcggacgacgtcatcgaaaccgccaggtaccttcgtcctatcacgccacccagcccagcacgatctactcttgtttgctttgcgcaaggatccagcgaaccagacccggtgatggaacaggagtccacccccgtgaattcagacgacgagtcgtcgatcggcgacaccgactcaatctacccggctcaagatgaacttctcggcagcccgtcgctggcaatggaccctgaggtcctcgagaggacccgccggcagatcgccatctatatggcaggggcgacccagccccagtccaacccgccgggaaacaacgaggccccgggcacatcgaaggctccggcggaaatcttggtggatctgacggaggaagttgccgagctcatgtcgactactttaacggaggagaaccgggaggcaatcaacaccaagttagcaaagcttcgggaagacatggccaaaacccgcagagacatggaagcccaggccgccaggatgaccacccagcaggcccagatcaacgccgaggcagagcgcttgaacgccgagaattggcgactccagcgacgtcagcaggcgtcggacgccgttcatcataggagacaccacggccgcctcccggccgacttgtagccgacccggctcttcaatagcccggtcacgcccggagtggaaggaacccagccgcatcaagcaccgggtgcaggaccgactcagccgcccgatgaccgcgagcaacggttccagaatccccggggccacttctcaaaccctgtggataacgtactcgcagccactcgctacctagagtcccttcccatttatggagactcccccatggacgcagaagccaggaacattgtggatatgttgaaaacagcggtggtccaaaacgcacaattctcgcatagccaggagtggctccattcaactcctcaggcgagttacacccggagtcgcccggtggacccgcccgccgtcaccaacggaccaaggcgcctgatcagagcacagtcgcccgaacttcaaaatcagtcggcccagggagctatgggaacgatagagccggctcaccaaggacacgttcatcgttcacccgccccgactgaagctggcggtaggtcggtcggcctgccgtgcctatcggccgcattgcgcaacgaaaagatgccgaaggacttcaaagggccccgaaaggtgccaaactacaatccggatctagagccggcctcatggatcgagagctatgagctcgcgatggacatgctcgatgtaagcgaggcggtctgctccaggtacttcacaatgatgctcgaaggaaccgcgcgcacgtggttgaaaaacctaccgcccaactccatccagtcttgggccgagttgaaggaacggttcatcaagaattttcgtggaacatgcaagcgacccatgactatcgtcgacttacagcattgcgtccaaaggcccgatgagtcggcccaccactggacccggcggatcgcggagatcattcattcttcggacggcatctcagccgcccaagcagtcttgatcctggaacagaattgccactatgaacccttagttcagaagctcgggcgactcaaacgaaaggtccaggacatgggagagttgatggacacccttacaaggtacgccgaagccgacgataccaaggatccaggggaagatggagataaagctaacccgcccaagcgcaatgagccgcccaaaggaaactcacgcttccaaggacgggctcatcataacaacaaccacaagagaaggcagcaggaaggtcctgtggagttcgtggctaacaccaatacaggtaacagggaacagcgcccgaggaagaagggttatagcgggaggaaaccccgcaattaccacgaaatactcaaggcgccctgtccccaccacgccaccgctgacggaccggcgactcactccctggaggattgttatgtgatgaaagagtacagggcggaggcacttcagcgcagccaaacacgcaaccaaggtcaacaacaggagtagttcaccgcacccgggccacgtcagaatcaattcggcgggttccccgggcaaggccagcaggatgaccctcagccggcgggagggcaataccccgtacataaccggcagcagtataacccgccgggggctttccaacaggcccctcaacagggggctccacagcggcaggaggataacaatgggtttcgcagcaaccccaggcaactgaacagtgggcagtatcatgtgttcactaccagcacctgcaaacgagaccgcaagctaaggaacagggcgaccggctttcctgagccggccctccccagttaccttcattggtcggaacaggtcatctcctggagcagggaggatcacccgccccgagttgataatccgggcgacttagctttggtcgtcgcccctcaagtcggggggtataccctttcgaaagtcctcatggatggcggaagcagcatcaacatactgtattacgacaccttccgaaggatgaacctcgaggagaaagatcttatgccttcaaccaccgtttttcacggcatcgtccctggtaagtcggcttaccccattggccgggttagacttaatgtggcctttggcaccgagtgcaattacaggagcgagccactggtgttcgaggtggtcaagataaagagccccttccatgcgctgtttggacggccggcttatgccaaattcatggctcgcccatgttatgtctacctcaagctcaagatgcctggacccaacgggcccataaccataagtggggataggaaaatagccaaggagtgcgaggaaggagatgcggcttatgcagaatcagcatgcgcagcagaggagctcaaatatcatcaggcacaggtcgatccgtcggacatgtcacctctcaaaaaaccaacgactgacactgagccggcactcaagttcaagccgacagacgacactaaaactatcgacttcaccccaggcgactcatccaagcagttcaccatcggggcgggtctggatcccaaataggaaagcgcgctcatcgaattcatccgtgagaatcgggacatcttcgcatggaaaccttctgacatgccaggagtcccgagagaattcgctgagcaccaccttaatgtcgaccccaaggcaaagccgattcggcagtacctccgccgattcaacgaggagaggcgcaaggcgattggagaggaagtcgcccgtctgttagcagccgggtttatcatcgaggtcttccacccggagtggttggctaacccggtcttggtactcaagaaagatggcaccttccgtatgtgcatcgattatacggacctcaaccgagcgtgcccaaaggatcctttcgcccttccccgcatcgaccagatcattgactcggtcgcgggatgcgagcatttgtgtttcttggatgcatactcaggatatcaccagatcaagatggccaaggaggatcaggagaagacagcgttcataaccccctttggggctttctgttatgtgtctatgccgttcgggctcaaaagcgtcggggcgacttaccagcgctgcatccaaaactgtttacaaggctagatcgggcgcaacgtccacgcttacgtggacgacattgtggtcaaaacactccggaaagaaacactcttggaagatctcagggaaacctttgataacctacgggtataccagatgaagcttaatcctaccaaatgtgtttttggtgttcctgcagggaaactactggggttcctggtatcagagcacggcatcgaggctaacccggaaaaaatccaagccataacctctcttggaaagccggccaatatcagccaagttcagcgcatggcgggtcgcattgcagccctcagtcgcttcataagtcgccttggtgaaaaggcgattcccctttatcagcttttgaagaagaccgatcgttttgtctggacagacgaggccaatgaagctttcgagaccttgaagcaacagctctctaacccgccggtcctagtagcaccagccgccaaagagccgatgcttttgtacatcgcagccaactccagagcggtaagcgtggcggtggttgtcgagcggcgagaggaagggaaagagtacccggttcaacgaccggtatactttgtcagtgaggttctaaccctttccaaacaacgctatccacactggcagaagctggtttatggagtgttcatggcaagccgaaaactcaagcactactttcaggagcaccctataacagtggttagctctgccccacttggcgacattgtacggaacagagaggccactgggagaatcgccaagtggtccgttgagatgggcccgcatcacatccagtacacgcctcgtacggccatcaagtcgcaggcattggtggattttatcaatgattggacagagttgcaaattccagaagataggccggacttaacctattggacgatatacttcgatgggtccaggcagctagaaggctcaggggcgggtgtagtcctgatatcacctcgcggagacaagttcagctatgtcctccggctcatgttcccctgtacaaacaacgctgcagaatatgaggccttgttgcatggccttcggcttgccaaggagatggacctgaccagggttcgatgcttgggcgactcagatttggtggcttaacaggtctctggaagttgggattctcgcgaccccctaatggcgacttaccgacgagcagtgtccgacatagctggacacttccatggttaccaggttgatcatatcgaccggcgactcaatgaagccgccgatgccctctcacgcctgggttcacaacgtaagtcggtccctcctaatgtcttcttagacgttttgcatactccctctgttaagctaccatcagaagaagaactggcggtgccagaccctgagtcgtcacttgtggcgactttacacgcaaccccggagtggacagctccttatttggcgtacctcacacggggcgagttacctcaggacgagctacaagcccgccaaattgttcgccgatgcaagtccatggttgtccgtaatggcgagttactcaggcgaagtacttctggagtcttccaaagatgtgtatctgcaggagaaggttgtgcgatcctcgacgaaatacacgcaggcgactgcgggcatcacgccgggtcacgctccttggtgtctaaggcgttccggcacggtttctattggccgacagctcatgcagatgcagaggaattagttcgtcgttgtgatggctgccaaaaatttggtcgtcaagttcatgtgccggctcaggaattgcggatgatacccatcacttggccgtttgcggtctgggggctggacatggtcggccccttcaagatgtcacccggcaaaaagactcatcttctgatagccgtggacaaattcaccaagtggatcgaagccgaaccggtcagcagctgcgactcggaaacagccgtcaaattcttgaagaagttaatcttccggtttgggtatccacacagcatcatcactgacaacgggaccaatctgtcccaaggagcaatgcaggaattctgcaatcgggagcatatccggcttgacgtttctgctgtcgcccaccctcaatccaatggacaggcagagcgggctaaccaggaggtcctgcgaggaattaagccaagactcatggcccccttggagcgtactccgggttgttgggttgaagagcttccttctattttgtggagccttcgcacaactccaaacaggtctactgggttcacaccgtttttcctggtatatggagcagaagctgtccttccaagtgacttaaaacatgactcgccacgagtctctgcctacgttgagcaagacaatgagtcggcacgtcaagactcattagatgccctcgaagaagcacgagatttggcagcttcacgttcagcaatctatcagcaagatttacggcggtaccacagccgccatgtcaagacccggtctttccaggaaggcgacttagtgctccggctaattcaagatcggacgggcatgcacaaattgtcaccgccttgggaaggacccttcgtcataagccggaatcttcggaacggctcatactatctgatggatctcaggccggaccggccgaccacggaggctgagacaactcgcccctagaacatagcccatctgcggccttactacacctaggagccactggctccccagcatattttttcttcagtcgtaattttattatatataaagcaataaagccggcacccatgaatttctgggttctcagccgtttcagcttcatgaaagcatgagtctttattgttccttaagtcgcccaaccatggacgctatcactaccaaagagcataagtcgccacgttgcgcttattacaaaactgggtactggtaagccaacgagggccgtaattcgctgtatggcgtggctcaatcaatggcgccttatgattctgagaagtaggccgacttacttgggggctaccggctcccaagtcgttttgcagtaagagcgtactacgcttctgcaatcctatgtctggtatcttccctaatcattggtcacttgggggcttcctctcatcaagatcagcctgaatacccacttgactagcgaaaaattaccgcattacaaatggttatactggactgtgtgttggccgaatcgccatatagacccatgaactcttggcgagtcaatccaattggaccctgaactctccttggttaaaacatgtttggtgccggctggagccccacatggaaaatagacaaaccattggctcactgagccggcttcactgaagcttgacccgtgcctgatcagccggtctaaatatatgagctattaaagctttccagggtagcatttgagtttttatactcctcctatcccgtcgcgccttgtatgagccgacaaaactgtttactatctcctttgtggcactgcccgggagtcggctttttattttgcctagcaaacattattatggcttactcagcccacttatggttattactaaccgttatatgtgcgtatacacgccaaatttttttcttatcttccaaacaggattgacgataagaccccttttccaagggcgagtcataatacaattacgatgatgttgcaaattttttcaaaaggagcaagccccaggtaaaacgtaagtgggatgatgttcaaacaaagagaggttacatggctctattggccaactggtactaagttaggcatcagccgcctccgggtcattctccttggagctctgaccctctccaatttgcaagtcgccgctgacccagttgcacccggctaaggaggcgaattcatcctcgtcgttcagcaactctgaaagatcagcttcgaagtcaaaaggattcttgggtcgtctggggaccaagcaggtcgccttgaacaccggaggagctacccttctattcttctggtcatatcccgcctggtacttggttatgtcttccaaggccgccactagttgagtcgccgggacacggcactccttcacaatttgcctcaggtcatcttcagtatacgctataccgtcttccttgaattccgggaagccgccagctatatcttcaggctttaagtcggggaagtaagcccgacaccggctcaaaacgttcaacgcccctttccgggcggctgatcgggccaactcgccaatttgggctggcaggatggacagattttccaacatcaccttgatggccatgcccggctctttgtgcccggtaaccgccttgatggacagaacgcctccaatatagagttgttccgtcaacgtatagatcgccttcagcttcaacacagtttcattctgaaggttggcggctcttggacctgtgggcaaaagacaggttagtcagcaataaacatcgtgaaatatggcggttctgagaatccccttttaccaaaagacaggtacttaccaaagatagcctgcgtcattttggcaacatgcttcttcaagccggccagttcagcagatatgctcttcagcttggtctcggctttctcagcccgcttcaacagagcggcttgttccagttgagcttgtttctccaaagtcttttgggcggcttttagttcctccacttcagcttggagactcttacattttgcttctgctgcggccctggcgtcttgctgctcggctaaattcttttggagatcgcccaacgatgacttagcatgtgttaaagattcctgcaaggtaagggcaacaagtctcagcattgttacatgtaacacccctgacacttgggggctaatgtataatttcaaccaaaattataccccggctcatcttctatcaagatgacccggctcttgggggttacaggttgaagttttactacaaggcccggctcatcttcctatcaagatgacccggcccttgggggttacaggttgaagttttactacaagacccggctcatcttcctatcaagatgacccggcccttgggggttataggttgaagttttactacaagacccggctcattttctattaaggtgacccggcccttgggggttacaggttgaagttttactacaagacccagctcatcttctatcaagatgacccggcccttgggggttgcaggttgaagttttactacaagacccggctcatattctattaaggtgacccggcccttgggggttacaggttgaagtttttactacaagacccggctcatcttctattaagatcacccggcccttgggggttaatggaagatatagggacatgatttgtacctcgtgttttgtcttcattcttcgcagaatttccctctcaatctcgtaagtactctccaggcgacttgagaagcctgaatgaagctggtcaaagtcgaaagtctcatattgggtaagatgggacttaggaactttgcgctcagaagattccacgggtgcatgtttggacagcaccgtcgttaccggcttactgtatcctgtgccagtaataaggacggtgtcatcgtcttgagccgccgccgaagagtttggcggctgatctttgggaccttcttcaaaaaactctggtgtaatatcagtggcaggatcatcggccaccgggttatcctccggtggaataccttcactagactcaggaacagcagcatcccgctgaggagtgttggaaggaggagttggtgctgagccgccagcttttcttttctttgcttgggcactgaaacagagttaaacagctcagatgatattattattacacaaggaaacatagttattaaagtgactcacccttgaacgcgagtcattggaggaagggctgacatcactgagtcgcccgaagaaggagaagaatcctgcacaacacaaatcttgaggtcagcagtcacgaaaagggcgacttataagacaagatgaagatagaaatacctcacgccctcgcttcttggaagaagttttctctggtaagccggccatcagatccccggtccgactccgagtcttgcgaatggcaccgtattgcgctttcttcataaagaaatcaggatccaaataggctctagggtcagaaatgggaaatttccagcagatctttctggccggcctaaaaggagaagaactggagtcggaagatatggcgattacctctggagcctcttcctgttctttacggtcgccgtcctatataagaagtaaagaagtataagtataaaaactagaatggctggaacaaaggagaacagccttgcctctggtaagtcgtcgccggctcgagacccctctgcgtcggaagattcagcgacaatggatttgctcttggtttgttttttggatggcgcctaagctttcttttgagccgactcctttatccctttcgcccaaaatggcgcacctggctgtaggacgtacaaggtttcagctttcgagaaccagaaaattccttggcgagttaaaataaggtaatgaaggagaaggagctactacctccggggcggggttggttttgcagaacggcttaagtccgacttttctacatgcggccatagactcgccgcacaacttcttaaccaggcgcgcgacttcctcgtcatcgaacttcgaatgaaagaaacactgagaatggtcaacagtgccgtcgtattcgtacatcaagccatcccggcgactcaaggggaggattcgccattccacccaacaacggatcaggtcgactccagtaaggccgttgctggtgagggaccggagcttggacagcgccggaatgaaatccgctgcatcttcttcggtcgccttatccgggaaactgaaatccttaggcagccgttctttcctgtaacccggaagaggattctcaccgggaggagaagtgtctcggcagtagaaccaagactcgccaaagcctttgggatggctgggcatggtgacctgtggaaattcggtagaacgccgtcgctggatattgactcccccgagctcaaggttggggccatccttgcactctggttggcgattcagatgaaagaagtgccagaataaaggtaccgtcggttcctcctgaagataaacctcgcagaagacttggaattggctgaggttgttgatggagtttgggcctaggtcttgagggtgaagcttcaggaagtgcaagacatccctgaagaactttgaccctggcggcttaaaacctcgttcgaagtggtaagcaaacactacgatttctcccggggccgaattgggtaagacgtcaccagcagcaggtcgccacccgataacttccttcttgtccagatggccgagtcctacataggactcgagggtggcttcgttgatcttagacgggagccagtcggccttcactatggagcccatagctacaaagggtcatgagatgaagcatgaggatgtgtcctgacccgcctgagactagggcgacttacaaattatgctctacaaagcctatcctagcagaggccacaggatgagaaagctagctacgaaaataccgcatgagtgctggtggaagtagccagccgatcaatggaaattctagcgagatggttcaataaccaagacaagtggcgacttataagtctacgggtcagtaacccgcccaataacagctttctacaaacgaagccccgacgattggatctacaggtgtggacgaaaaggatgcaataaaggcttgaaattgaataacaaggacgaagcttagcagaagcatgatattagaggtctaagcatggcattcagtttagggactggcggacggcgaaatcaagtattacagaagtgaaaagaaccacgaatacactgctatcaggatctaccgcaaatacactagggtagggttatgacctaaaacatggagatgggtcgctcgggcgccaatggctagcaggaagatccaactctagaagaacaagatctaactctagaagatgagatgtgtacctgacaagatggcgcgggaagaggaccgccgaaggttggaggtgaagcagcgcacctcgtctgatctggaggcgcctgggtgcgacgaccggtgaaggagttcgtcggtgctgttcgtcggctggcgttgggttcctggcgtcggcgcgaggaggaagaaggaggcgacgatagagagggagtaattactactgtcccctccaaagctattaaataagccggtacaggaatcgaggcgaccagtgcgaggatcaaggcgaccggcgcgcagatcgaggcgacacgtgcggggatagagacggcagatggtaacttccaggttttggcgccaagattttcgggatgatatcgcggcgaagagatccgttgagattttccggctcctgaagattgctaaggcatgatacggatatcagattggcccggaattatcgcaaggcaggcgcaatgaaatggcgagtcaacataagccggataacggggatggcgtgagtcgcccacaagatggagggtctcattggcgtgaatgaattcaagtcaatttgaggcctaatgttggggatattcctaaacagctaacccgccccacctagcgccgggtcagcccagggcacggtttatcctgtgggctgggccttgagcccctggtgatccggagaagagatggcggttcggagttaatatcccggacgtcgacgagacggtggccggcttggaggacacggcgagttagagttacagtcgggcacgggatgtaactcggtcaggactctttgtaaaccctcgggccctgacctataaatataaaggcaggcccccaggggtagggcagacaactaagaatcgagagctagatacggcggcttacgcccctcttgtaatcgaaacaccacagcaataaatcccaagcaggacgtaggctattacctcttcacgaggggccgaacctgggtaaaccttgagtcccgcttccgctcaaacccctttgagtcgccacctaggtgcgatggctccatctacaagtcctttaaccaggacatctgccgtgacaaaaccacgacaccaaccaaccttttctgctggacccaaccttttctcagcaaaagaaatgcaattctttagttgcattttgaatattaactatagaactatttcttggaagaacattatcatcttctgacttgtaaatttccattcactctctaacttatcatttttaagacaataattcatatggaaatgaaatgcacattcatagtgaaatgcatattgtctatgtgaatcaagaaaatatggatgtcttattgtttctgggagaactaactttagtaattaaaggttgataaatgatatgcacttagctgctctttcataatgaggaagtatcaaatgcaaggttcaataccattggagtgtttctcggagaactaactttagtgaaatgcagattgtctatgtgaaacaaatctgtaattctataattttgcagcataagtagacctgataaactccagattttgtaattttgcagcataagtagaacagataaaagatttggatttatatggatttgttggagtgtttcctctgctatcatgaacaagggggaaatcatgctttaaagcttcttttattttgtttcctctgctatcatgaataaggcgtacaaaatgaatgtaaagtatacaccattagcaacatggcatggttcaaaagactgcaattttgatttttgggggcaattcgatcgatatctcgctcacctatttggaacacaaggaaaaaacttagatctatacatggtgagtgctgcagagaaggttatccaccattgccaactaaaatccacaacagtggaactaacagttttgatgtattgcttgagataagtacccaaagctgctatgtattgcttgattttcacagacaaatcaataccaattttgatgtgctgaataaaactgcactactatgtattgcaagtttgtaacccgtcacgcaagtcaaaatccgaaactcatcctatcatatttccccctctaatcttccatagtagccatgtaaattacgaacacaaaccttgatgcaaggaagtgcgaccaatgaaaactcacctttcacccatcctgaagtgttaataacaatcggtatagctgatttgtgagggttatcagcctcgttgaaacgatagagttctttaataaaataatcataaagaccaaaaatgtaggttaaaggaagttttgggttcttgtgtgcagcaacatcaccaaaaagaagcacctagaatatacgtgagaagaccacgaaatgttaccggtgcatacgcttcccttcagtaagtatctaatgcaaatatgttggaaatatgccctagaggcaatgataaatagttattattatatttcctgtttcaagataatcgtttattatccatgctataattgtattgattggaaacactaatacatgtatgaatgtatagacaaaacaatgtccctagtgagcctctagttgactagctcgttgatcaaggatggttaaggtttccagaccatagacaaggtgttgtcacttgataacgggatcacatcattaggggaattatgtgatggatgatatgtctccatcatatctacttttccaaactcttttgcccttgttttggactctaatttgcatgatttgaatggacctaacccggactcacgctgttttcagcagaattgccatggtgttgtttttgtgcagaaacaaaagttctcagaacgacctgaaaatttacggagaatttttgtggaatatataaaaaatactggcgcaagaatcaaccggagaggcgcaaccaggggcccacgagccaccaggccgcgcccccctggccatgtcgtggtgactcgtggagtcctcgtggctccgccgcctctctccctgagcctatttagtccctttcgtcctggaaaaaaatagaagaagagtttccatcgtgttttcgaggcggagccgccgccaccacctgttcttcctctgaaggtaagatctggagaccgttctgggctccggagaggggaaatcgtcgccatcgtcatcatcaaccttcctccatcgccagtcccatgatgctcttcaccgttcgtgagtaatctcatcgtaggcttcctggacggtgatgagttggatgagatctatcatgtaatcgagttagttttgatggggtttgatccctagtatccactatgttcctagattgatgttgctatgactttgctatgcttaatgcttgtcactagggcccgagtgccatgatctcagatctgaatatattatattttcagcaatataattgtgttcttgatcctatcttgcaagttttagtcacctactatgtgttatgatccggcaacccccgagtgacaatagccggaaccactcccggtgatgaccatagtatgaggagtccatgtattcactatgtgctaatgcgttgttccggttctttattaaaaggagaaccttaatatcccatagtttccattaggactccgctgccacgggagggatggacaatagatgtcatacaagttcttttccgtaagcacgtatgactatatatggagtgcatgtctacattgtatcgacgaactggagctagttgcatatctccccatgatattaccgttgcatgatgaatgccatccagcatactcacacatcaccgatccattgcctacgagcttttcaccgctggtctctgcttagttactttgccgctactgctgttacacttgttactgctgctgctgttacactgctactactgctgctattaccactgctcttgttactactttgctacttagctctcttgcagatattaagtttcaggtgtggttgaattgacaactcaactgttaatactcaagaatattctttggctccccttgtgtcgaatcaacaaatttgggttaaatacttaccctcgaaaactgtcgcgatcccctatacttgtgggttatcaagaccttttttctagtgccattgcctgggagcatagctatattctctgagtcacttggatttatatttgctggtcactatgaggaatttgaaagatctaaaaaccaaagtcttgccctcaactacgagtacaggtaaggaactaccatctagctctgcacttgattctccttctgtcatgagtaaatttgcgacaccaccacctattggtactcctgatatgtcgcctgtgctagatgatgctatctctgctgtgcatgatgctcatgatgacactttgcttgataatttaccactgggtaaattcctagatgctcatattgctagagttaccgctgagtccgatgatacttctgaaactgatgaaacttttgagatagaacctgctgctacacctggtagaactagctcccctagatatgaattgcctgatatacccaaaggttatgttatggagggagaggtagctgaagattttcttgtttgtaaggatagttatgatgttgagaatcttctacgcaagtggaaagaaaaatctctaaacgctagaatgaaatacgatcctaagtttgctacttcacccatctttatcactaataaagattatgaattttctgtcaatcctgagttaatctctctggtcgaacttgatccttttcatgggtatgaatctgaaaccgttgtagcacatctctccaagttgaacgacatagccaccctattcactagtgaggagaaaattcgccactacgatatcctcaagatgtctccatatggcaaatatatgaaagacattgtcacgaataagagaaagatacctgatacgtctccaacgtatctataatttttgagtgttccatgctgttttcgaatcaactttgaatgttccctatgcatttatatgatgttttatatcttttttgggactaacttattaactcagtgcccagtgcctgttcatgttttttccttgtttttgacctcttgcagataggaatatcaaacggagtccaaacggaataaaacttttgccacgatttttttacggaaatatgacgaacacgagacttgagaaccaaggcagcggggcacgtgggaggccacgagccaccactgcgcgggcccccctggccgcgccgtaggggctcgtgggccccacgtggctccggtgccctacttcttccgcctataaattccgataaatcgtgccacggaagaaaagagagccgcaattaattttccgcccccgcaagcctctgcttttgcaagatcccatctggaggccgttccggtactctgccggagagggatccggagttggagggcttctacatcaacaccattgcccctccgatgatgcgtgagtagttcaccacagaccttcgggtccatagctagtagctagatggcttcttctctctcttggatcttcaatacaaagttctccatgatcttcatggagatctatccgatgtaattcttctttgcggtgtgtttgtcgagatctgatgaattgtggattcatgatcagattatctatgatatatatttgagtctttgctgatttcttatatgcatgatttcatatccttgtaattctctttgagttattggttttgtttggccaacttgatctatgattcttgcaatgggagaagtgcttggttttggattcataccgtgcggtgacctcacccagtgacagaaggggtagcgaggcacgaatcgtgttgttgccatcaagggtaaaaagatagggttttcatcattggtttgagtttatccctctacatcatgtcatcttgcttaaggctttactctgtttgcatgaacttaatacactagatgcatgctggatagcggtcgatgtgtggagtaataagaagtagatgctgacagtaccggtctacttgtctcggacgtgatgcctatatgcatggtcattgcttagataactttatgactttgcgcaattctatcaattgctcgacagtaatttgtttacccgccgtgatatttgcttttatgagagaagcctctagtgaacactatggcccccgggtctattttccatccactattttcagatctgtattactttctctgtcagatctcacttttgcaaacaatcgtgaagggattgacaacccctttgtcacgttgggtgcaagttgctgtttcttgtgcaggtcacttggcgcttcatgttggagttcctactggttcgataccttggttctcaaactgagggaaatacttgctgttgctgtgctgcatcaccctttccccttcaagggcaaaaccaacgcaatctcgagtcaaattgccaatttttggtgacgtgactgggaagtagcaggaagaatttctggcgccgttgccggggagttgcaagtggagcacatctaccaagtacctctcgcaaactcatctcttgcatttactttgtttgccagttgcctctcgttttcctctcccccacttcacccatttgcctttttctttcgtcctttttttcgctttctttccgttttcttgtgtgctatgtgccttcaaaatgcttgcatcttcgcttgctaagaatctagtgacatggatcctcatccacttgctaatcttttcaagaggtccaactatgttgaaccaattgctagtgagttttgcttactagattatctttatggagttttgcttgagatgcgtgaatctgaaaattgtgaggaagaaatttatgaagtgattcacaagggctccttggatgaaaagcatgattgcaatggtttcactataaattctattagtgacaattatgccaaaaatatgcaaaaccctaagcttggggatgctagttttgctatgtccactacttgttgcaatgatcatgattggggggatgatttttcttttgatcttgaaaatttgtttaatccacatgatgattgcaataataaagagtgtaaactttgcatgcatgtggatcatgaatttgaatatgatcccacatgtaattattatgagagaggaaaatgttttggtagaaactttcatgttactaagctacctctcgttatgttgagattgacattgtctctttcttcttccttgcatatggcagttattgcttgtcttgataatttgtttccttataaaatgcctatgcataggaagtatgttagacttagatgtgattttcacgtgctttatgatgctctcgttgtgcttcaattcttgtcttttgtgtgagcatcattgaattatcaatgcctagctaagggcgttaaacaatggcgcttgttgggaggcaacccaatttatttttgctttttttctttctgttttatgtcttccacacttttataattctgttatgatggtgttttttgtgttttaattagcgtttgtgccaagtgaacccgttatgattattcttggtgatgattgtttgatcacgctggaaaagacagaaactttctgctcacgaaaagaattttcatttttattatggaagatattttgagttgattcttttttctgctgatttctacgcaatttctacagacgttcgtaatttttcagattttttgaggtaacagaagtatacggagtatacagattgctacagactgttctgtttttgacagattctgttttcattgtgttgatcgcttgttttgatgaaactatggatagtatcgggggatacgacccatgcaaaagttagaatacagtagtgtaacaccaatatgaatggaattcaagttcacttcagtacctttcaagttagtagtttgtttccttgtgctaatgatatcacaagtttccgtttaagttttgtgttgtgaagttttcaagttttgggtgatcttcctatggacaatggaacaaggagtggtaagagcctaagcttggggatgccccgggaaggcattccctctttcgtcttcaatccatcggtgtgttacttggagctatatttttattcaccacatgatatgtgttttgcttggagcgtcgtgtgttatattagtttttgcttttagtcgtgccacagttgtccttgctgcacacctatttttgagagagacacccactcatcgtgtatttgttagaatactctttgagcttcacttatatcttttgagctagatattttttctcccatgagcttcacttatatcttttgagctagacacctttgctcccatgagcttcacttatatcttttgagctagttgatttgttgctctagtgcttcacttaaatcttgttagagcacggcggtggcatattttgtagaaatagaaactctcgatcttcacttatatctttttgagagtgctctcttaaagaacttggtaattggcttgtgctatgaagttagtcctatatgtgatagacatccaaagaggatacaataaaaaacctccatatttaagtgcattgattagtaggagaaatttgcttcctcttgcttagttttgagatgtgcttatggtaatattagagttatgttagtagggtgttgtgaatctagacatacttgtgataaagttagtgattcccgtagcatgcacgtatggtgaaccgctatgtgatgaagtttgagcatgattagtttattgattgtcatcctttgtgtagcggtcgggatcgcacgatggtttatacctaccaacccttcccctaggagtatgcgttgaatgctttgtttcgattactactaaaacttttgcaacaagtatatgagttcttcatgactaatgtgagtccatggtttagatgcacttttgccttccaccattaataccttctctagtaccgcgcaactctcgccggtgcataaacccaccatatagcctccctcaaaacagccaccatacctccctcaaaacagccattccgagatatatttccatgtaactaccaccgttccgtctcatgacatgtgcctccacttccacattgccattgcatgatcataagatagctagcatgatttttctatgccttgtccattttttgatgtcattgctatgctagatcattgccacggtacactaccgaaggcatttcatatagagtcatcattgctctaaagttttgagttgtaagtgtgatgatcatcattaatagagcattatcccatgtgaggaaataaaagaggccagcgaagcccatttacaaaaaaagaggccaaagatgcccacaaaaaaaagagaggcaaaagagcccacaaaaaaaataagagaaaagagagaagggacaattgctactatcctttttccacacttgtgcttcaaataccaccatgatcttcatgatagagagtctcctatgttgtcacttccatttactagtggtaaattataacttggcttgtatattccaatgatgggcttcctcaaaattgccctaggtcttcatgagcaagcaagttgggtgcacacccactagtttcctttgtgagctttcatacacttataagctcaagtgcatccgttacatggcaatccctactcattcacattgatatctattgatgagcatctccatagctcattgatatgcctagtcaatgtgaccatcttcttcatttttgcctcacaacctccaccatattccactccacctatagtgctatatccatggctcacgctaatatattgcatgagagtcgaaaaagtttgagaaagtaaaggtgtgaaaacaattacttggccaataccgaggttgtgcatgatttaaatttgttgtgcaaggatgatagagcatagccagactatatgattttgtagggataactttcttttggccttgttatttcgaaagttcatgattactttgctagcatgcttgaagtattattgttttcatgtcaacattgaactatgagttacaaagaacaaaatatgctaggtagaattccacctcaaaaattcggtctttatcacttccctactcgaggacgagcaggagttaagcttggggatgcttgatacgtctgcaacgtctctataatttttgagtgttccatgatgttttagtatcaactttggatgttccctatgcatttatatgatgttttatatcttttttgggactaacttattaactcagtgcccagtgccagttcctgtttttttaccttgtttttgacctcttgcagataggaatatcaaatggagtccaaacggaataaaattttcgccacgattttttttcggaaatatgacgaacacgagagttgagaaccaaggcagcggggcacgtgggaggccacgagccaccaccgcgcccccctggccacgccgtagggggtcatgggccccacgtggctccggtgccccacttcttctgcctataaattctgataaatcgtgccacggaagaaaagagagccgcaattacttttccgccgccgcaagcctctgcttccacgagatcccctctggaggccgttccggtactctgccggagagggatccggagtttgagggcttctacatcaacaccattgcccctccgatcatgcgtgggtagttcaccacagacctattcctactccatctattgttattggaagctttgaattccctattcctactgtcaagatgagagatcatatacttgttggggatatgctcgtccccattgaggtaacttagtgattattcaaaagttcttcggttttatgtgattcgaaaaaagtttatcaaggagacttgatcaacctcatttatgaatttcttttgatgacaatgagatggatgaacctagaagtcacaacctgctgttattaacttttactttatgtagcttagaagaaaaatattatttttagccttttctccctgttttctgctttttccgttcaatggaaaagtgaccgaaaaatcaaagttctcaaaacttcccgaaattcaagtatgattttttctggaatatttgagaatttctggggcaaataacacgtcagggaggtgtgccagtgggccacaagcctgcacggagcccccctggttgcgccatgcaagctcgtggggcccacgtcgccccctccacttattccagcccccatctccttcttcttcctccagaaaaaatcctttcagagctcaaacccgtgttcttgctcgttttgctcagtttttcgatctccttgtgcaaaaccccattcaccgaactgttttgaggaaattgctccttggtatccccaagctgaaacaagctatgaaaatgccctgataggtaggtatggtggctgttttgagggaggctatatggtgggtttatgcaccggcgggagttgggcggtactagagaaggtagtaatggtggaaggtaaaagtgcatctaaaccatggactcacattagtcatgaagaactcatatacttgttgcaaaagttttagtagtaatcgaaacaaagcattcaacacatactcctaggggaagagttggtaggtataaaccatcgcgcgatcacgaccgctacacaaaggatgacaatcaataaactaatcatgctcaaacttcatcacatagcggttcaccatacgtgcatgctacgggaatcactaactttatcacaagtatgtccagattcacaacaccctactaacataactctaatattaccataagcacatctcaaaactaagcaagaggaagcaaatttctcctactaatcaatgcacttaaatatgaagattttttattgtatcctctttggatgcctatcacatataggactaacttcatatcacacgccaattaccaagttctttaagagagcactctcaaaaagatataagtgaagatcgagagtttctatttctacaaaatatgccaccgccgtgctctaacaagatttaagtgaagcactagagcaacaaatcaactagctcaaaagatataagtgaagctcatgggagcaaaggtgtctagctcaaaagatataagtgaagctcatgggagcaaaagtgtctagctcaaaagatataagtgaagctcaaagagtattctaacaaatacaccacgagtgcgtgtctctctcaaaaagaggtgtgcagcaaggacaattgtggcacaactaaaagcaaaaactaatataacacacgacgctccaagcaaaacacatatcatgtggtgaataaaaatatagctccaagtaacataccgatggattgaagacgaaagaggggatgccttccaggggtatccccaagcttaggctttttggtgtccttgaatttggcttgggatgcttagggcatccccaagcttgggcatcccagtcacgtcaccaaaacttggcaatttgactcgagattgcgttggttttgcccttgaagagcaaagggtgatgtagcacagcaacaaaaagtatttccctcagtttaagaaccaaggtatcaaaccagtaggaacttcaagataaagctccaagtgacgtgcacaaaaaacagcaacttgcacccagtgcgacaaaggggttgtcaatcccttcacgattgtttgcaaaagttagatctaatagagaaagtaatatagatcagaaaacagtagatggaaaatagacccgggggccatagtgttcactagaggcttctctcataaaatcaagtatcacggcgggtaaacaaattactgtcgagcaattgatagaatcgcgcaaagtcatgaagtcatctaagcaatgatcttgcatataggcatcacgtccgagacaagtagaccgatactatcagcatctacttcttattactccacacatcaaccgctatccagcatgcatctagtgcattaagttcatgcaaacagagtaaagctttaagcaagatgacatgatgtagagggataaactcaaaccaatgatgaaaaccccatgtttttacccttgatggcaacaacacgatacgtgcctcgctaccccttctgtcattgggtgaggtcaccgcacggtatgaacccaaaaccaagcacttctcccattgcaagaatcatagatcaagttggccaaacaaaaccgataactcgaagagaattacagggatatgaaattatgcatataagaaatcagcaaagactcagtatatatcatagataatctgatcatgaatccacaattcatcggatctcgacaaacacaccgcaaagaagaattacatcggatagatctccatgaagatcatggagaactttgtattgaagatccaagagagagaagaagccatctagctactagctatggacccaaaggtctgtggtgaactactcacgcatcatcggaggggaaatggtgttgatgtagaagccctccaactccggatccctctccgatagagtaccggaacggtctccacatgggatctctcggaagcagaggcttgcggcggcgttaaagtaattgtggctctcttttcttccgtggcacgatttatcggaatttataggcggaagaagtagggcaccggagccacgtggggcccacgagctcccacggcgcggccaggggggcgcggcctgggggctcgtggcctgccacggtctccgctgccttggttctcaagtctcgtatctttcttactctcgaaaaaaaatcgtggcaaaagttttattccgtttggactccgtttgatattcctatctgcaagagttcaaaaacaaggaaaaaacaggaactggcactgggcactgggttaataagttagtcccaaaaaagatataaaacatcatataaatgcaaagggaacatccaaagttgatactaaaacagcatggaacactcaaaaattatagatacgttggagacgtatcaggcagccattcaggtggtagctgccacgtcccagtacaacccccactatgacttcggttatcacccggaccagccgtgggagtaaaccaacttaggccaaaagcctaagcttgggggagtacgtgtttctcaccaactttacattcatgttcacatattcactttgatagtcggcgttcacaatttttcccttgtgctatccacgctagcttatttatttttcttgttttcttttcgtgcgtttgcttagatttgagaaaacccaaaaagattttctgttcttcttttgcttgttgggagctttcccgtatcaatagttttctttttctttgagtcgaggtagaagaccatgattgcaatgcttagtggctctcatatgctttattgtttatctttcagtgagccatattactttgtcttctgatggcagctatgttacccctgcaacggcgccaaaaacggcaccaggaactgctgcggctatgccttaagggacttcctaggcaaatatgcaaaggatctcccccgtggccttggagcctttcgttggtgttccctcgaagcggaaagggtgatgtagcacaatgatggtaagtatttccctcggtttgggaaccaaggtatcaatccagtggaggagtatctcaagatcctgcacaaacacaaaaacttgctcccaacgctatgaaggggttgtcaatcccttatagattgtttgccaagtgagaactgaaagtaacaaagtaacaaagtaacaaagcaaagtaaaagtagagatgtaaatgatggatatgagtagatccgggggccgtagtgtttactagtggcttctctcatgaaagcaagtagacggtggatgaacaaattactgccaagcaatttatagaactgtgcagagttgtgatgatatctatgcaatgattatatctataggcatcacgtccgagacaagtagaccgatactttctgcatctactactattactccacacatcgaccgctatccagcatgcatctagtgtattgagttcataagaacagagtaacgccttaagcaagatgacatgatgtacagggataatctcaaaccaatgataaaaaccccatctttttacccttgatggcatctacttgatgtgtgccttgctgccccttctgtcactgggaaagatcaccacatggcagatcccaaaaccaagcacttctcccattgcaagaatcatagatctagttggccaaacaaaacccaagactcggagagagttacaaggatatcaaatcatgcatataagaaatcaacaaagactcaaatatatatcatagataatctgatcacaagtccacaattcatcggatctcgacaaacacaccgccaaagaagattacatcggatagatctccatgaagatcatggagaactttgtattgaagatccaagagagagaagaagccatctagctactaactacggacccgtaggtctgaagtagacgactcacgagtcattggaggggtgatgatgatgaagaagaagccctccagctccaatgtcccctccggcagggcgccgggaagggtctccagatgagatctcatgaaaacggaagcttgcggcggcggaaaagtggtttcgaggctccactgattttttagggaatatttgggaatatataggccaaggatctaggtcagggggcggccagggaggccacaagccctggcttcgccgcctcccccctgggggcgaagtgggagcttgtgggctccctggagcccacctggcttggcccagaggccccctgatcttctttcgttcgggaaaaaatcatttcgggatttttattctgtttggactccgttccaaaatcagatctgaaaagagtcaaaaacacggaactggcacttggcactgaattaataagttagtcccaaaaaagatataaaagatacacagcatgaaaccaaaaaaattatagatagacaatctgaacattcacgtcacataagacgtatcaagcatccccaagcttaactcctgctcgtccttgagtagggaagtgataaagaatgaatttttgatgctttcgtgctacctggcatagatgtcctttgtaattcctcttatgtgacgtgaatgttcagatccattagattcaaaacaatagtttgctattgacgtggaaacaataataattcaagcaaacttagcaaggtaatcatgaactttcaaaataacaaggccaaaagaaagttatccctacaaaagcatatagtctggctatgctatatcatcattgcacaatgaatttaaatcatgcacaaccccggtaatggccaagtaattgtttcacacctttactttctcaaaccttttcaactctcacgcaatacatgagcgtgagccatggttatagcactatagatggtgtggaatatggtggaggttgcaagacaaaaaaggagaagatagtcacattaactgggcatatcaatgagctgtggagatgctcatcaatagatatcaatgtgaatgagtaggaattgccatacaaatgatgcactagagctgagagtgtgtgaaatctctttgagaagaactagtggctgtgcatccaacttgcttgctcatgaagacctaaggcaattttgaggatgcctatcattggaatatacaaggcaagttatataatgaaaatttcccactagctatatggtggtgacaaaacgagagactctcaatcatgaagatcatggtgcttaatatgcacaagtgtggaaaaagtggtagcattgtcccttctctctttttctctaattttttttgggggctctttggcctctttttaatatatatttttttattttggtgggcatctttggcctcttttcgaaactgggcttctttggcctctttttatttcctcacatgggataatattctccctggagcccacctggcttggcccagaggccccctgatcttctttcgttcgggaaaaaatcatttcgggatttttattccgtttggaatccgttccaaaatcagatctgaaaagagtcaaaaacacggaaaaaacaagaactggcacttgggactgaattaataagttagtcccaaaaaagatataaaagatacataaaacatccaaagaagacaagataacgacatgaaaccatcaaaaattatagatacgtttgagacgtatcatcttcccctttgattttgcttgcagattccaacttagtccaatgccaaacactcttattattattcacatcattcggtcgtgcaagtgaaaggcaataatgacgatatatgatgaagtgattgagcctagaaaagctggtatgaactcgacctattttgtttttgtaaatatgactagctcattgttcttattcagctttgttatgagagaaacatgtttgcaatgacaacttagagatcatagttgcttatgccatgcttaattagctaggagtttataatagtttgtcttgagtgccaatatgaattttgagatgatcatgatgtagtatgataggatggtacccacctttgaatgattcaagtggcttgacttggcacatgttcatgcatgtagttgaaacaaaatcaacatagcctctacaatattcatgttcatggtgatttatatcctgctcatgcttgcattcaacgttggttaatctcaatgcattttgatgactgttgtcgctctctagttggtcgcttcccagtcttttgctagccttcacttgtactaagcgggaatactgcttgtgcatccacttccataaacccaaagttattccatgagagtctaccatacctacctatatgcggtatctaccagccgttccaagtaaatttgcatgtgccactctctaaatcctcaaacaataatctgttttgtatgcccgaccgctcatgtggtgacaaggggcggtcggtatcttccatgctaggtgtgttatccttgatacgtgtttattcactatcacttatgagaaaagggccggtaatcggaatgcccagttccatgctcaaaacacaaaataattacaaacaaaactccccctgggttgttgttagtttggacggtacccgaggattcggctagccgtggagtatgattgatcggttgtgggggagtcaaaactttacttttctgtttgggaaccgcctatgatatgtgtagcatggaagatgttgtaaacccttggtcattgcgttgataatgaaagcataccgctcaaaatactattctctgttttaaaagcttgagctgtggcacctctgcaaatcaatgcttccctctgcgaagggcctatccgtttactttactgttgagtcaacctcctcttacaaaggcaccaattagagagcacctccatcatttttatgctttgctattaattgatattgactacgactgtgactggatcttctttgccatgaattataatgttcagtcagcccttgatctttgaaggtgctctgtatttatgttttgcggtctcagaaagagctagcgagataccacctgttcatattgtattatgatcgttttgattgaattgttggtatttgaaactcattattattgctcgctagttgattatgctattgatatgagttaatttgagacctgaatatcattgcttatgtgtttagcttatgatcttgctgaaaatctgaatataatttagacatagttatgacaacaagatcaaacacagtttgtcaaagtttttcttttgtctctttcagtttgtcaactgaattgcttgaggacaagcaaggttttaagcttgggggagttgataggtctccatcgtatctacttttccaaactcttttgcccttgttttggactctaatttgcatgatttgaatggaactaacccggactgacgttgttttcagcagaattgccatggtgttgtttttgtgcagaaacaaaagttctcggaacgtcctgaaaatttacggagaatttttgtggaatatataaaaaatactggcacaagaatcaaccggagaggcgcagccaggggcccacgagccaccaggccgccccctggccgcgccatggtgactcgtggagtcctcgtggctacgccgcctctctccccgagcctatttagtccctttcgtcctggacaaaaatcagaagaagagtttccatcgcattttcgaggcggagctgccgccaccacctgttcttcctccggaggtcagatctggagtccgttctgggctccagagaggggaaatcgtcgccgtcgtcatcatcaaccttcctccatcgccaatcccatgatgctcttcaccgttcatgagtaatctcatcgtaggctcgctggacggtgatgagttggatgagatctatcatgtaatcgagttagttttgatggggtttgatccctagtatccactatgttcctagattgatgttgctatggctttgctatgcttaatgcttgtcactagggcccgagtgccatgatctcagatctgaatataatatattttcagcaatataattgtgttcttgatcctatcttgcaagttctagtcacctactatgtgttatgatccggcaaccccggagtgacaatagccggaactactcccggtgatgaccatagtatgaggagtccatgtattcactatgtgctaatgcgttgttctggttctttattacaaggagaaccttcatatcccgtagtttccattaggactcccctgccacgggagggatggacaatagatgtcatacaagttcttttccgtaagcacgcatgactatatacggagtgcatgcctacattatatcgacgaactggagctagttgcatatctccccatgatattaccgttgcatgatgaatgccatccagcatactcacacatcaccaatccattgcctacgagcttttcaccgctggtctctgcttagttactttgccgctactgttgttacacttgttactgctgcggctgttacactgctactactgctgctattaccactgctcttgttactactttgctactaagctctcttgcagatattaagtttcaggtgtggttgaattgacaactcaactgctaatactcaagaatattctttggctccccttgtgtcgaatcaacaaatttgggttaaatacttaccctcgaaaactatcgcgatcccctatacttgtgtgttatcaatggacaagaccaaactatgaacgtagcatatgatcctgtaagtttactgctacaattttatgcatgtcaatgtatctattcctatgaccatgagatcgtgcaactcccggacatcggaagaatactttgtgtgtatcaaacgtcacaacgttacttggtgactataaaggtgcactacgggtatctccgaagatgtctgttgtgttggcatggatcaagactgggatttgtcactccgtgtgacggagcggtatctcggggcccactcggtaatacaacatcacaaacaagccttgcaagcaatgtgactaaggagttagacacgggatcttgtattacggaatgagtaaagagacttgtgatggcagctatgttacccttgcaacagcgccaaaaacggcaccaggaactgctgcggctacgccttaagggacttcctaggcaaatatgcaaaggatctcccccgtggccttggagccttgcgttggtgttccctcgaagcggaaagggtgatgtagcacagcggtggtaagtatttccctcagtttgagaaccaaggtatcaatccagtgcaggagtatctcaagatcccgcaaaacacaaaaacttgctctcaacgctatgaaggggttgtcaatcccttatagattgtttgccaagtgagaactgaaagtaacaaagtaacaaagcaaagtaaaagcagagatgtaaatgatggatatgagtagacccggaggccgcagtgtttactattggcttctctcatgaaagcaagtagacgatgggtgaacaaattactgccgagcaattgatagaactgtgcagagtcgtgacgatatctatgcaatgattatatctataggcatcacgtccgagacaagtagaccgatactttctgcatctactactattactccacacatcgaccgctatccagcatgcatctagtgtattgagttcataagaacagagtaacgccttaagcaagatgacatgatgtagagggataatgtcaaaccaatgataaaaatcccatctttttaccattgatggcatctacttgatgtgtgccttgctgccccttctgtcactgggaaaggtcaccacatggcagatcccaaaaccaagcacttctcccattgcaagaatcatagatctagttggccaaacaaaacccaacactcggagagacttacaaggatatcaaatcatgcatataagaaatcagcaaacactcaaatatatatcatagataatctgatcacaagtccacaattcatcggatctcgacaaacacaccgccaaagaagattaaatcggatagatctccatgaagatcatggagaactttgtattgaagatccaagagagagaagaagccatctagctactaactacggacccgtaggtctgaagtagactactcacgagtcattggaggggtgacgatgatgatgaagaagccctccagctcccaaatcccctctggcaaggcgccgagaagggtctccagatgagatctcgcggaaacgaaagcttgcggcggcggaaaagtggtttcgaggcacccctgattttttacggaatatttgggaatatataggccaaggatctaggtcagggggcggccagggaggccacaagccctggcttcgccgcctcccccctgggggcgaagtgggagcttgtgggctccctggagcccacctggcttggcctagaggccccctgatcttctttcgttcgggaaaaaatcatttcaggatttttattccgtttggactccgttccaaaatcagatctgaaaagagtcaaaaacatggaaaaaacaggaactggcacttggcactgaattaataagttaatcccaaaaaagatataaaagatacataaaacatccaaagaagacaagataacagcatgaaaccatcaaaaattatagatacgtttgagacgtatcaacttgccggtaacgagattgaaatatggtattggataccgacgatcgaatctcgggcaagtaacataccgaaggacaaagggaatggtatacgagattatctgaatccttggcatagaggttcaaccgataagattatcgtagaatatgtaggatccaatatggacatccaagtcccgctattggatattgaccgagaggtgtctcgggtcatgtctacatagttcttgaacctgtaaggtctgcacacttaaggttcggtgacgtgtcggtatagttgagttataggtgctggtgatcgaagttttgttcggagtcccggatgagatccaggacgtcactaggagttccggaatggtccggaaatgaatattgatatataggatgacttcatttggttaccagaaggttttcaggcactactggtagtgtaccaggagtgacgaatgggttccggagattcatcgggagcggggaccacccacccgggaatgcccaaggaccttaggggtggcgcaccaagcctggtgggacagccgaaggaggtcttggcgcaaggaaagaaaaaccaaaggaaaaaagaaaaaaaaggaaaggtgggaaggaagagaaagactcctccttccaatcctagttggactaggattggaggactccacctccttttgccggtgcacccattgagggacttggccctcaaggcaaggcctcctccctgttcctcctatatatagtggggttttagggctgatttgagacaacttttgccacgtgcaaatcagatctagacacctctacttctccatttctcgtctagatcgcgtttctgcggagcttaggcgaagccctgtaggaatagcaacaccaccaccactggagcgcagttaggctgccggtgaactcatcttcttccccgcccctcttgctggatcaagaaggcggagatcgtcatcgagctacacgtgtgctgaacgcggaggtgccgtccgttcgacgcttgatcgggacggatcgcaaggcggttcgtgggtcggatcgcggggctgttcgtgggatggagatttggatctcacgagcataccactacatcatccgcgtttattaacgctttccgcttagcgatctacaagggtatgcagatctaatctccctctcgtagatgatcatcaccatgatagctcttcgtgtgcataggaaattttttgtttcccatgctacgttccctaacagtgatatcagagctaggttcatgcgtagatgattttctcgagtagatcacaaaggggtttgtgagcgttgatatttaagttgcttccctccttagtattttctttattcggcggcattgttgaatcgaagcggcccagactgatattactcgtaaccatgagagactggtttcaccgttaacatgcaatgagattgcatcaaggtgactggtgggtgcctgtttcttcaactttagttgaatcagatttgaatgaggcggtccttggagaaggtcaaatagcaacttactcatcaccgttgtggtttttgcgtaagtaagatgcgatcatactagatatccatagcagccacgtaaaacaagcaacaacaaattagaggacgtctaacttgtttttgcagggtatgcttgtgatgtgatatggccaacaacatgatgtgatatattggatgtatgagatgtgtcatgttgtaatagttaatatcgacttgcacgtcgatgctacggcaaccggcatgagccatatggttgtctttaagctaacgtttgtgcttgcagatgcgtttactttattgttaggttgttgccttagtagtaatagcatagatagcacgacaaccacgatggagacacaatgatggagatcatggtgtggcgccggtgacaatgaagatcatgtcgatgcttcagtgatggagatcgtgaagcacggagatcatggccatatcatgtcacttatgatttgcatgtgatgttaatccttttatgcaccttgttttgcttagtacggcggcagcattataaggtaatctctcactaaaatttcaagataaaattgtgttctccccgactgtgcaccgttgctacagttcgtcgtttcgagacaccacgtgatgatcgggtgtgatagactctacgttcacatacaacgggtgcaagacagttgcacacgtggaacactcgggttaaacttgacgagcctagcatgtacagacatggcctcggaacacaagagacccaaaggtcgagcatgaatcgtatagttgatatgatcaacatggagatgttcaccattgtggctaaactcaagtcacgtgatgattggacttgagctagtgaatttggatcatgctacacttgaataactagagagatgttttatttgagtgggagtttattagtaatatgattagctaaactctattatcttgagcatagtctaagtaaactttacaatatctatgttgtagatcaatggctcgcgcaaacgctaccctgaattttaatacgctcctagagaaagctaagttgaaagatgatggaagcaacttcgccgattgggctcataatctgaggattatcctcactgctggccaaaaggattatgtccttaatgctgagcttggaggtgaaccacccgctacggctgatcaagacgttaagaacgcctatcaagcacgtaaggaagactactcaatagttcaatgtgcaatcatgtatggcttagaaccgggatttcaaagatgttttgaacgtcatggagcatatgagatgttcacggagttaaagttcatcttcgagaagaacgcccggatcgagaggtatgagacctctgataagttctatgcctgcaagatggaggagaattcgtctgtcagtgaacatgtactcggaatgtctgggtactccaacagtctagctgagctggggattgaactcccgcaagaagctatcactgacaggattcttcaatcattgccgcctagcgttaagagcttcgtgttgaactacaacatgcaagggatgaacaagtcacccgttgagctgtttgcgatgctaaaagtcgctgagttagaaatccgtaaagaacatcaagtgttgatggtgaataagaccaccagtttcaagaaaaacggcaaaggcaagaagggtaactctaagaagagcggcaaatctgttgctactccggcgaagaaacccagcacgagccacaccttcgtccgcgggagacgacgccagaaagcccacaccagggccgcccaaacctagatggggcccaaacaggcctatatctgggctggaagggcgccaccgccagccatcgcaccgcctcgcagccaagcagccgcgccaccaccacctcgccactcggagctgcgtcgcccgcgaggccacgccgcgttggatccgtcgtcggcatgtgtgcaccgccgccaaccgccaccactcgagctgtcgcgctgcacgggaggaaaaagtgggcctgctgcagccgacaccatgcgagcaaggcctggtggccagcaccgacggcgacgggaggggattagaaggagggggtcgctctgggacgaggagggaagggggccccggttgcctcgctcgcgaaggcgacgtgggggatagaaggagcgggggtggtgttcttccctcgagattcgaggtttttaatttaagatatccgattgtagaacgcattatgtggggcgtgactggtcagtgttcacggacgcactgagacaacaccgaacacgtccacgagcgtttaagagcaagtataataaagctgagtcagctggttataaacaataaattagtatatttttgcttagttagagggaaaaaaatggatagagaagataaacgagctcttagttaagagccagttgtagcacgtgcttataggcattaggtgagaatgaaaattgagtcatataataaaaaaataatactccctccgtcacggtttagaaggcacaattagacttgcgtgcgttttcaaaatagacaaagattaaggcgcgttgcatttactcttaccagctaattagtactccgttgtactacttctatatgcatgcatagtgtgaatgttattttttaactcatttcacagccaatcaataaccatctaggtagtagagattttgcatgcacgtcttttaaaaccgtgacggagggagtatatacttttctaatcaattattatttatgttggctgaactataaatgatgtgacaatatcttatagtcggcagctgctattaaccatgctctagaaggtcagatgctctaacatgactttagcacggtgtgaatggcttggaccttggtaccgtgctcaacattaattcccatagcgtcagtccagcagcgggcagcctgtggtgcgctgcacatgaccagaccaggggccatgtctcggccaggtcggttggtggccaaattaaaaggctttgtgctgctcacaacgtttatttcttccttgcacacaacaaacaatcattgatctgaaatcaagctcatcttgggagtgggacgatgtgggtggaggggcaaatcctatatttgggacttctacctttagtcccaaataccctcttttagtccctaaaagtccctcctgtttgtttcacatggtactaaaagggattttttttagtccctacaccaaaaagtccctggaaacaaacaccccctaaagctgagtttgattgaactgcagattataaaaaaactgttgtaaaaaagctgttgtggaaaagttgttgaaaagctggaaattgaaaagtcagggttccttagctttgaaatttacgctaggaagaagctacagattctcaaaagctgctttaaacatttacacctttggttatcttttagcttttaaagcatgagttggtaaaaaagctgaaccaaacacaccctgaggggttgggaaacgtaaacgtcattggcggcttcgtcgcggctgtctctgtctcgttagcgagagttgtctgtggagaacccaggagctcccctggctatgtcacccatcagaacttctgcaccgcgcttgctactctcgtactcggatccgtcggaggaatcatcgcataaggaagagaacaagctaagggcgggctcgtcagagttgagcattaccacctgcgcagctgtggcgtgaagtgtcatggcgcacttgatccaccgctgcagtcgtgagagcctagagcgctttgcgacgggccataacggagtgagaggaagccgaacggtacagggccgatggttgtcggaggagaactccgtacgccgccgcgttgaaatacgccgcgccgcgggcgggtagcgcatccgtgttcaacggggctttcggcagtcacgccaaatcgtcagcaataaagctaaggaaactgaacatgatcttcccccgagtgtcatcatgaccgaaaaaataaatctccacccgtgccggaatttgctagacgtacaacctcatgaatgactactgcactggtgtgacactagtagtgccggaactgtcaaggaaacgaacctggcaatagcactaggatatgaatgaatgacgaagcctaactactgcactggtgtgacacttatatttctttaaaagggagtattcatcaatttggcttgatcaaatgaactgtatgtcagtagtgtcattttgatgtgaattcatgcgatcgttgctagttaagacatacatcaaccactgagagctactcccccattcttaataagatggatataaaaaaattgtatttcgcatgtcatctgatagcaattttgtgcgttaatttaatttttatatgaataagtaggcagatatttataaaaaaatgtatatcaaaaatagatacaattactgtcgttgtattcactagattggcgcccgagcaaaatagcttgctcatggttttgaatttatacattttctgaaattttccatttaaattgatatccctccaacaaatagagagatgtgccaagaaaattaatgattgtatctcggccatcctagattcctaatccttccaacctggcacgtacgtatgccacaagtggacacgaaaattgtgatacaagttaccgacggcaatgctgagcggagtttagatcaaccatcactcttgaaattaattagtttagtttgaaaaataaggaaactactcgatgggcacccggtgcgtgtaatcttctgaggtgtaattattttgtttgtttgtaggtttggtccagtgggccgatggactctgtgatccgttcaaatcgagctgcagttctgccgacagcaacgcgtgatgccacagttgcattgagcagtgaaagtgaaaggcgtggcatcatatccccgccgggtcggttgctgctcacaacgtttatctcttccttacacacaagaatcaatcattgatctgaaccctgctcatccatcttttccagaagatatacactgcgagcagaggccttggtagtaacagactaacagcacacagacaccagctttcttcctctccacactaccgcaatcttccaagtatatatagagagagagagagatccagctatggagattgccatgggggctatcgggcctctcctccccaagctcggcgagctgctcatgggtgagctcaccatggagaagaaagtgagaaagggcatcgagtctctcgtgacagagctgaaattgatgcatgccgtcctcagcaaggtggccaaagtgccggcggaccagcttgacgagggtttcaagatctgggcgggaaatgtcaaggagttgtcctaccaaatggaggacatcgttgatgctttcatggtgcgcgtggaggatggcggcgagcctgcgaacccaaagaacagagttaagaagatagtcaagaaagtcaaaaatttattcaagaatggcaaggatcttcatcggatctctgatgctctggaagaagtggttggtgaagcgaagcagctggctgagcaacgtcaaaggtacgaactcgtacatgacaccgtggttggttctagcattaatcctcgtgtgatggctctatacaaagatgtgacagacctcgctggcattgaagataccagagatgagttgatcaatatgctgattgggggtgatgattggttgaatcaacccctgaagacaatctccattgttggatttggcgggttgggcaagacaactcttgcaaaagcagcataggacaagatcaaagtgcattttaactgtgatgcatttgtttcggtttctcaaagtccggacgtaaagaaagttttcaagaatattctctatgaacttgacaagcacaagtatgcacacattcgtagcgaagactgggaagaaagacatctcattgatgagctcgtggaattccttaatggcaagaggtatatatgtttttttcctcttacaactcgatgaccatttagtaaaatcatgagacttttggcatactatatatgtattctcacatcatatcattgatccactatatatagttttctagtgttcatataaattggtcatgttttctctgctgattttcacttggatgtcatataatagttgttatgaagatctaaaggtttttcttccttgattgaaagatggttcaccaatttactggctacatgccttgtgttggggtttacttgctggatgctttgtgttggattttctagcataacggtacttttctggttaatttattacatacttctaatatacgatgtcacattgggatatttgttgttacatacgtatttttttcctgtgatagttgtttgatttcttttccctattttggatgcttgcagtataaatttaaaattgaaagggagatgtcgtaaagccttgattgatttttattagaatattctttgtgcatttgaaatgtatcaggcaatcacttagtttgaaaaattatatacttaactcacacatttacaatactagattttctgtaatgttgatatatttggcacaaatgttttccctgtgacagttgtttcagggttttccctaatatgagtacttggaaagttgaaatacacatcaaaattatacataatgccaaaatgaaattttttgaaatttaatttagtatgcttatccttttaagatagttggagtgtgcatacatacctaagcatgcccatagtaaaaatatttaggcataacttgacccgtgcaatcaacctaatcataaacagactagatgcatgcacatattcaccacgtccaagctatggcaaaaaaggtatattatttggtttttttgcacataatgacgggtagattgagcacacaatgaaataaagtggaagaccccaagccttataaaaacatgaaataacttggataatataatttggcgtaacatggcaacttctaaaaatcttgtattgtgcttttatatattatttttgacaggatactatccctgggtataacaagagcgtagattagccttctccaagacatttggggaaccgcccgggcccaggccggctgacggtagccggcccgctcggcctacgagtccgaccggctggcgatagttgtccccttcggcccacatgggccggccccatgatctgcacatacttgtccggctagcgatagccggtcacccattcgacgcgtgcccggccgcctggcagggctcagcagcctgactggcctaccgtcagccgtacggccggctcccgtcccttccggccgtaccatcgtatgaagacaagaaaaatataggatacagagctaatcacaacagcagtacgcgctgacacacggcgtggccacttcgtgatgatggctgagtcagcgaggctatggggtgcctagacggcaccaacaacggccagacggcgcggccttgtagccatgattgccctcgcgcacgcgccttgacgactcggcgtgtcagccgctgctgcacacggccggcgggccccacgacaagacccgacagtcggcgggccccatagccagccaagaggctggcagccgggtcccaccttcagtcttatcactaacaatgtactcccatggctatactatagagcctcccttctgcccaccgagagaggcaagttggactacgtagaggttcacttacacacactcagactcacattctcccccaccatttgatgcagcgggaccgacaaccagtgctccgtcaccctcctcacgaacagctcaaggagcaacctttgtattgtgattcccatatagtcacacatgcaggattaggggtcttacctcactagagggccttgaacctgggtaaacttgcgtcatgtgtgttgcgcctacacccgttcccaggcccgccggcgcccatcggccccaaaccatgagttaagccaccccatggcatctgtctcagaaataccacgacagttggcgcccaccatggggccagaagtgacgccggccggagtgacgttccgggcgggacccttcaccccttctggtgagcgcgtggcgcacggcttggtcgtgcgctatggcgcgctcgactgcgtcaacggcaacggccgtcgtctggaggacacggactttcccgttgacggctccatcaccccatttggttcgcaccgcatctacgttgcggtcgtggccgactgctaccccgtcgaggtgctcagctgcgacgagccgccaccagccagcagcagcaaccactccggcggcatcgacggcctatgcggccgcatggaggtgctcaccctcacctcgcatgccgacccatctgggtatcgagccccgatccgtgcggcgatggacacactatgcacccccatcctaccggtggccgtccccgccgtcgcaacccaagaggtcgacgccagccgcctgcaactgctcagcgaggcggaagcgctggatgcgacccaacacgagttcgaggccactcgacacaagttcaacgcggcccacggcctcatcccggctgcccccaggcccagccggcgggcctacgtgagacgccgcggcggcgccttcggccaagagctggcctgcggccatcccatttacgatacccctgtctagaatatgcgagctgcataggctgccatcgccgagctggaaggtctcgagggcccggcccttaaagcgcagcaagaacgcatccgcgccctcatagaggccgtcaatgtgcagcaggtggagtcgtcccggggccaaaccgactctcgctcaaggaccattgacgatgctggccagcgcacaaccagtcggcgggagacgtacgaggcatctttgcctggcaataccgagcaccactgcggcaaccagcgggctggaagccacggccagcgagaccgtagcccgtcggttgttgacagccgcatgcgggtgtcggctggtcagggagactgccagtcgacacgaagcggctgacgcgaggagcgcgaccagtcggcagtacctagcatgccgatgtaccagctcataggtgcgcgccagcttgaccaccaggacgcgcgtttccacctgggaggccttgccaaagctcgtgccaccgaggaggagggcactgccagcccgttgtgctttgggctgcgcatcctcagggagcctttccccaagggcttcactttgccccgcgacactcccaagtacaatggctcgaccaagcccgaagattggttgaccgactacaccaccgccgtcggcttctccggcctcaacaagcgcgtagccgtaagctatgcgcccctcatgctgctcggttcggcccgaacctggcttcacagcctgccggccggcagcgttaacggctcgctggacttccaggagacgtttgtgcacaacttcactggcacgtacaagccccctggcctatcccgacagctcgccctgtgcgttcagggccaggccgagccgctccgcgactacctcacgcggtggaccgagctccgcaactcctaagagggcgtccatgaggtgtaggcgatccaatactttatcgacggctgccgagacggcaccctcctcggtcttagttctcaaatgcaacatcatcactcaaaccctgatccattcggggactaatgatggggttatagtcctagggtagggtcgtaggcctgccctataagtactactcaaggacccctcttcattaattacgacgacctcaggatactcccgactagataagggcaccccttatccagtcggtagacaaccactcggaagacaagcatgtgaatgacgactggagtccactcggagtaactcattacctcctaggagatcaacaggcacacgcttggcattcgccattatcgtcatttatggcatacgttacatgtaacgctagcaatcaaacaccacttatcgcacccttgtctgccgaaccattatgaggggtagcgcactctatataagccgcccctcccctctggcacaagggttcgcatccctgtaacattctattccactcgacatacagctccttgaggactgagacgtagggctattacctccaccttagatgggcctgaactcatacatacttgccgtagctaggactctgccctcttactttcgtatcctacacatctactgtcagtcttacaaccacgacatcggccgcaccatcggcagccgtcttggcagctccctcgtcgccctcgggctcctctgagctggacgccacccgttcctcgccgtcgatgatcgagatgccgtaatcatcctcggggatgggcacgccatcctcacccagctcggggaagtaggtgtctagcgccgcgtagctagcaagctcatgggctcggaaaccgatctcctcctcacgtcgcgccaggtcggcctgcgacgccgccctcaaggtactcggctggctagggttgatgcaggagtaccaagagacgacgaaggtcaaggcgatccgggcgccggcccgggcgaccgatgccctccacgcgtcaaaccagtcaagggcgtgcccgagccacgtcgcgacccggccctcgaggaccccctcagcacggtcgagccaaagggcctgaatgacgccctggcctgccttcagtagccggtcccagagggcccgaagatggaccacccgagactcgcaggcgtgtgccaccttcgccgctgaccagttggcaccctcgccctgctcgccgccggctcggtgctgctcttcccggtatgccatcacggctctctccacccgtgtcttcgtgtgtgagaagcaagctggcccacagaaagaaaataagaaaaaaggaggaggccggctaaacacggctggcaaacgcagtgatgcttaccagcaaagacgtcgtcgacaccgcgaagaaggctgagtacgctggccgcctcccggtctgctccccttttgagcttcatggctcagcacgcctcctccctgagccgagccacctcgtcctacagggtcaccgccaccgcatcgctagcagctgtcgcctgctgcgcggcctccatcgccgcctccgtcgcctgtaacgcgcttccgagccgctccacctccgcctgcagggtactgtcgagccgctccacatccaccttcagtgccaccgtggttgtccattcggcagccaggtccttgtctagccagtcgcgctccccggcaatctcgtcgcgttgtcgagcctcggacatcggcaagtgacttgcgcagctcctctgcctcggtcacgggaatggacgctgctgcacaagaaaaagagtagcagctggctagactacaacaacacaaagcaataagatttggcccggctggtgcgaagctgcgcaacgggcccgaatctcggggactacacccaatgggtgcgctagcgcgcacccaccaacgaaaagaggaggagaattacccttggccgcctccaactcggccgtccgagccgtgaggtgctcacggaccttgaggtagcagttcttggcgtagcggccgacatctaccgcgtcccggaaggtcacctcacgctgtgccttctcggactgaaaaggcaaaaatggagaagagataagattcggcccggctaccccgaagccgtgcagccatctcgaatctcggcgactactccaagtgcgcgcgcacccaccaccaaagcaaacataggaaaaagcttaggcgagaagctaacatcgagcgccttctccaagttcttgaggttggccaccgctgactgggcgaagctgaccgcattcttcttgtagcgggccatcacgcccatcgctcacgacatcgacactgtctgccccggggcaaggggtcatgcctcggtctcgggaagggcgttgtgcagctgctcccacgcggacgtcaccagagataccgaacagggacagccgctgtcgctgcctcccgtagccggtgtagatggaatcgcctgcgctgccgacaccacgatggctcggccaccgtcatcaggggcatcagtcacggctccgatgcgctggcctggctcaaacaccgagaagatcaccacttgggcggccggctcgctagctggtggggtcgccacctccggaggcggctctgggcacgcatccacatgcgcgggcaaggacctcgccttgggaacctcgggcggcggcggcggcgcagcggcccatgccgtctcactcgggggaccgtgggcgccggctgtccaagtcgacgcagccttagccttcgcgtgccgctcccgctcgagccccgtcattgccgcgtgttctgcggtgagcgatgcaacctactcggcctcgagggctgatgcctcggcctccggcagctcaagatcagccctaaaaacagaaatgggaacgagctcaaacgccacgcgaccaccaagaaaagagaagaaaagagaggcatgagcctccaggaaaaccttacccttcgtcgagggggatcttgcgaggcccacccctgagcctccgctgcatcggtggaggggagtcgtgtggcaggaccaccgaccgggtcttcttggcgattgggccaccggccaagccatcggtcgaccgcttcttgcggcgttgttcctgtgttgactggcggcgggccggctgggtaacagtcagctagcctccagccagcgcctcggtgctccctccgcggtgaaggccccgaggcggccccgttagggtcggcggtgcgtccagcacctgcaactcatcgtcatcgtttgtccagtccttgacggaccgttcggggggatggcataacgattctgcctcgtcggttggggcacggaccggctcgtccacatcgtcgccctcgcccccttcatccccttcatcgcccgacgagttcgagctttcgggggcatcggggcaaaccccgtccgactcatagtcctcagtgtcagaatcttctcgatccgtgaggaaattcattgggttctggccgtctggggtgttttgccgaccgaacatctggggaccacatggaccgcacgtcaggtgctgcgaacaaagaaagaaggcaacaaagggaaatacagtaccaaccgactgagtacttaccagtggtgctcggctaccgcggtggaacggctccagggcaaatctccatgcctctcctcatcctgctgaaagttggtgatgccgttcaccaggcggccaccttgtccagcggcagctccactgtcgccagccggcacagatccttgcggccgctcatatggcatatcctgtgcggcctcgcctgcaaaggatgcatccggtgagagatgaaggttgctatcacatttgcgcccatcagccccatcgaagattcgagctgcttcagccggccgatcatgggcaccgtgtcctcggtaaatgggtcggcgagccagttctccacattcaacggtgcgtcagaaaagggggatggccgacccagtcgcgcccctctccgacgctgcagacatagaaaaggtctgctgccacttcttcaaggactccttgaacttcatctttggcatcggtgggccgctccgcctgtagatcaccgcgccgctacaggagtagtccgtcgggccgtgcttcaggcagcggaagtagaagaaatggcggaagaaggacgagaaagggcagatgcccaagtacgcctcgcacagcgtgacgaagcatgcgatgtacaagacagagttcacccccagatgatgcatctggaggccatagcactaaaggaagtgcagaaagaaggagctcaccggcagcccaaatccgacgaggaagtggctgccgaagaccaggtgttcgctgtcgagaggttccagcacgagctcatcttcgggcgcacgggcctcaaccatcccctcggacgggagcttccgcgtccgacggacgtactcgatttgcccatcggtgatgatggacccctcccacgagccggccgaaagcctcagcatctccgccgacgccggtgacggagcagagagaaagaggcaagagagatggcttcccagcagggcggccgcaaggaggtgctatgggtgcgaggaggaaggaggaggtgaagaggtgctgcgggcgcgaggaggaaggtaggaggcagagagcatatcgcgaggaggaaaaagaagtggggagaagggtgaggtaacagtggcctcggcctcccccactccccccttttaatgccttgggaaggtgacggggcatgcgggatccgttacgcccacgatccccacctccccacgatctccgcgcactaaaagcgcgtggggaacgccaaccgacggcgcgtggccacagaagatccgtgcatgagccgaggcgggccaggttggccctatagcaccgtcccatcgcgtagaaaggggcggtcctgccgccagccgttggccgacacgtggcgtcctccagccggcgtcagacctgaggtgacacagggaaccaaaggcgccgtagcggccggctgcgaccatggacggctgtcgctcccgcgacgcggggccttgccgcccgccaaccatgtccggccggcctatctcgacacgtccttccggtgcgggcggaaaaaccgctggccctcctcgcccggaggcctccggatcccaacggtttcgggggctactaacggggatactacccatgggtataccaagagcggagcatagccttctccaagacatttggggaaccgcccggccccccaggaccgctcggcccacgagtccggacggctggtgatagtcgtcccctttggcccccatgggtccggccggctggcggtagccggccccctgtggtctgcacatacctggccggctggcgatagtcgaccacccattcgacgcatgcccgaccgcctgccggggctcggcgcccggctggcctaccgccagccgtacggccggctcccgtcccatccggttgtaccgtcgtacgaaggaaagacaaatataggatacagagctaatcacagcaacagtaagcactgacacacggcgtgaccacagcgtgatgacggctgagtcaacgaggctaggggtgcctagacgacaccgacgccggccagatggcgcggccttgtagccatgattgcccccgcgcacatgccctaatgacttggcgtttcagccactgctgcacatggcggcaggcaccacgaaaaaacccgactgccggcgggccccacagccatccaagaggctggcaaccgggtcccacctttagtcttgtccctaacactgtactcccatgactatactataaatactcccttctgcccaccgagagaggtaggttggactacgtagaggttcacttacacgcactcagactcacattcagccccaccatttgaggcagcgagaccggcagccagtgctccgtcaccctcctcacgaacagctcaaggagcaacctttgtattgtgattcccatgtagtcacataggcaggacaaagggttttacctcaccagagggccctgaacctgggtaaaccggcgtcatgtgtgttgcgcctacacccgttcccagacgccgccggcgcccgtcggtcccaaaccatgagttaagccaccccatgaaatctgtcccggaaataccacgacaattttacatatcttcattgtactgatcagttcactaattattaaatttactcacaaaggtacctcatcataattgatgatatatggagtggagaagcatgggagttaattcagtgtgctttctccaaaaagagtcctggaagtcgactaattacaacaacccgcatttttagtgtctctaaagcatgttgctcttccaaggatgatatttacagaatggaacccctttctgatgatgtatcaagaagacttttctataaaagagttttttctcatgaggaagggtgacctcaagaattgttgcaagtatccctagacattttgaagaaatgtggcggcataccattagctattattactatagcaagtcttctagtgatcatgaagcttcagatcaagttactacaaacctagtaggtcgacaaggtcacgtactgctccagagtggtacagtaaccctgtcttggaggtcatgttgtttgacaacaaatgaacctatgagctatggagaagcgatggtgggcctggattccgactaatggctggaggccatgaaatccgagagaggatccatgtatgaaaacaaagtggtgactttggaagaactacttgatggtcgtaagactgttaagtgcacatggatattaataaggaagacagacaatgatagtgacagtcactattaagaaaagcttgacttgtcgcaaagatgtttccgacaaagttcaaggagttgactatgatgagactttctcactcgtagtgatgctgaaagtctgttgaaattgtgttaacagttgccgggtaggtgtcagacgtatgcgggtcaggaatctcatctgtattagagtgctgaacaatgcgtaatcgtgtccctctcatgtaccaatccaaatatgcattgtattcagtaagattaaaggcttgttcttcaagccaaacatgttcagtggcggtgttccattctagaacgtactgttctagccgggtcagccactgagcctgtgtcctgttgcttccattccttgtcatcctgtaattgatggtcttgtttaaccatagatcataataatagacaatgtactatacagtaattatataatacctgtggactactgctggcagcatgttctttgtagcgggtggcttcgccatccgtctaagaccaaactgtctcatgacccgctgctgcgccatctcctcaacgaagacatcgaagataatcttcgatttcgtcatccagtaagcactatctctcgtgcatagatcagaaataccatcaggatatctcgaaagtctggctgcttgtgtgtaaggttgccaaataattccagtgtaagtatcaaactgctcattcagtgcagtgtaggctcgcctagtctgttcattagcataccgtctctgcgtaaaacaatagtcagtttcaatgatactgtagaaagaatgtggataacattatacaaggagacataccttgtgacgcgtccaacataggccgaaagtaggcagatcgatgttatcaacatcaaacaagttgcccacattaaaaccgtggtcgacatctatgtttggtcgtcctatagagaacctctcccacgaccacagttgtaaaaacagagggcaaccaagaatggccgacttggccgtcgatagctggcaaccattgcacatacctcggtatgtagctgctaataccacagatccccaacttcttgatgtgatctgttccggtgcctgagcgctcgcgatttctagtgcaatggggatgtagcgcgcactcacagtggtgacatggttctcagtgaacatcaccttcccgagaagccacatgaggtatgcctccaggctacgagtaatctgtatatcactcatttcgacgtgtggatacccgggaaatttctcgatctgcaatattgtaaggagaaagtattagttattaatttaaagcatgtcaatttgaatcatgtgcattgaaagataagttgttaggaacattaccctgaaattttgtaaccacttaaacttaggtccgtgtggctctgacgccagagctggagcattagcatatatattcaaaaaacgtgctcccaatgtagtttgccaatctggggggtctgccaacggtcctatggcatttccggccaacggaagtcctagcaacattgagacatcttgtagagtaggagccatctcaccccaacggaagtggaatgtgtgggtctcaggcctccatcggtcaactaagcaagtgagcaaagaagagtcaatgcttagggggctcgatgtctcagttgcctcaactagacgtgcgaaaggtaaaagtccggaccattttagtctgcatataaaacatgtaaattatgttacttacagtgtacattttttacaaatacttctagttcacgaataaaatgtttatctttgaacccacagtggatgtatactccagtcaaacttcgaagtgcgagtgacaagtggtacgagcttctgctcacttaatagcgccatttagtctgttacgtatcaggtcatacttccattgttagttctgcttgcaaagcttcttgaatagattcatcaggttcttatttctaaactgggaaaagaaatttgcacctagatggcgcatgcaccaacggctctgaatgtcttcccaaggagcttgttcatcaggagcagggtttgataatgtcttgatgacgctgagtatacctgcttgcctgtcatgaaggatgcacacattctgcttatctcgcacaactgctattttcaactgcctgaaaaaccatgtccaactggggatgttttcgctctccacaaaagcaaatgcaagtgggacgcattgattttgcccatcttgaccaatggctatgaggatctgacccttgtatttgccagtgagaaaagtgccatctacacatatcaccggtcgacaatgtctgaatgcttcaatgcagacaccaaaagagaagaacaaccgatgcaacaccctaacagttgggaactctggcaggtacaagtcttggatgtcaacataggtgccaggattccggttctgcagtgcctgcaggagccgaacaacagagtcatatgcatcaaaatacgaaccgaatctggtctcaagtgccttctgcttagccctccaagccttgccatatgatatgttgtacttaaacctgacgaatacatttctgtggatagccttcacttccatcgccttactctccactatctcgctataaagcaagcgagcaatcaccgtggaagtaaggttaggatgatcttgagggatacacggaagtacacatttatgattaactatgtcactgatgacccagcttgtgacatacttggggagatatccatgcacccttgcgggacaaccctgatttctgcataccattgtcaagtttttcggacaagaaacttgagctacaaaaaccctttgagtggacattgcccaattaaggatggcatccttcagagcttgtttgttcgggtagagggcacctgtcgcaatgttgttctggtgatactcccacgcagaatcatgaccgtcgttcaccaacattgcagatgaaaagtcctgattccatgatgcaggaataggcacttcatgtgcgttcacttcctcatctgaatcggccgaatcatcggagatatcaccttccatatcttcatcatgcatctggttttgcatgtgctcatctatctcgtcagcatccgcctcgccgctgacataatcatccgcatctcccccttctgcctgactactctcgtctgtttcgtaaacatcatctccagcatgggagccatgaattgactgcgaatcatgcatcccgtagctgctctgaccatactcatagctaccttcggcttgaggttcagtcaccggctttagcacggggagcagtaaggccacaggattacatctcctacgatcgcaagattttaaccagtgcacccactggtcgtcccgctctatatgcttcaaataccagaaaatatttgcactggaccgggtccataatgcatgaacaccgacggtgtgtgtttcaatattgaaccctaaacatcgggcaagccattctgtcaactgactaacagaccatgtttcaggggaggacacttgcacctcagtatactgaaattcactaagatcagctcccatctcatttgttcgaacggaactaggaccatagtgcaaacataatgtcactgaatcagacatctggcagttcaacaaggataaaaattagaacaaggacaaacctacttcagtcactaaatatttttccacatctatcggacaactaaacatattaaaactactacagtcactaaactaaatttatactaatctaccggagaactactacagtcactaaactaaatttatactaatctaccggagaaccactacagtcactaaactaaatttatactaatctaccggagaactacttcagtcactaaatatttttccacatctatcggacaactaaatatattaaaactactacagtcactaaactaattcaccgaagtaaaaataaatttacccttgaagtgtgcgcagaaacgacgaacgacgaatgacgaacaccgataataataccgaacgagcaaccgccaccaccagctccaactccaccaacttcacccacacctccaccaccaccaccaccactacaacctcctcctcaacctcctccacaacctccaccaccaccaccaaaaatagcttcaaaacaaccaccgcatcacgaatgagaaggatgattaggcttccctcaaacttacgcaactaaaccacggttcaaaacgtagttctatcggataagtaggaagaatggaagatttttcgtgtgggggagaaagagagaaatgagaagaatgggagaaaggagaagaatgggaaggaagaaagagaagaatgggaggaagaagaaagagaggaggggaggaaggagccgttggggggctctggccacctatcggctacggggaggccgactggagccctgtcggctacggcgaagccgacaggcccccctcccaccgacaggcccagcggcgacgtggcctggccacttatcagccaccacgtggccgattagccctagtcggccgtggtgtggccgacaggaccctttcggccacgggtgagccgacaggccccagtcggccggggagtggccgacggtggtatacttttgcaaattttcaaaccgacgcaatattttccaaaaagatttaaaaaaagtaatatttaaaaaaaaattagctagagtaacatagtagatatcgtaacatgttaaatgcaatgctactatgtgtcttgcatgtcaataaatgaggtcatctatgatactattttatgatactatgcattatagaggtagtatcatacaataatatcatatgcataatactactatatgatactccacactatgaccagcctaacaccgagcaaacaatcattgatctgaacccatctcatcttctccagaacaaatacactccgaggagaggccttggtaggaacaacacacacacgaaaacccaagtctgctctcgggctcatctgcttcttgtcacaaaataaatcaaaataagtaatagaaaaaatttaaaaattctatttttttccgtggtagataatttgatgtgtgaggtccgctttaaattttaacttatttgaagatctgggcagcttttgataaaaaaagacaaatcgggtcaaaacagttcatgaacagctgaccttttttacagaccctgatttatttttttcgctaagagctgctcacgcatcaaattatctaccacacaaaaaaaattggtctcttttgatttttttctactatttgttttgatttttctgaccgggagcagatgagcccgggactactcatatgtctaaataagctaaaatttagagcggacctcacgcatcaaattatttatcatatattttttttgaaatttttctactatatgttttgattttttttcgtcggcgcgggtgcagctgagctcgggagccaaatcgtcgcttccacacatacaccagctttcttcctcaccacactaccgcattttgaggtgtaattattttgtttataggttgggtccagtggggctaggctctgtgatcggtttaattcgagctgcagttctgccgagagcaacgcgtgatgccacagttgcattgatgagtgaaaggcgtggacactggtggccgtcgtgctctactttacatgactttgccagtgtgaaccgcttggacactggcggaggcgcatctgtgctcaactttaatccccagcgcatctgtcctagtgtggtggcggaactaaaagcatctgtgctgctcacaacgtttatctcttccttacacacaagaaacaatcattgatctgaacccagctcatctccagaacaaatacactgcgaggagaggccttggtaggaacagcacacagacaccggcctttttggaaaaagtctattttgaaccctgaatctgtagaggttcgccgaaatgaacctccaattcaaaatccctgtcgattgcaccctaaactatgaaatcccggtctaaaaagaaccctggactcgtttggcagaccgggattgttcatttgatcgggattgggctgcgcctcgaggggcaagcgcgaaaatgactgggccagcccagtcaatcccatctcgctctcggacttcacaatattttgaaatgccgtactatttttataatatttaaaatattttaaaatgccacgtactatttttataacatataaatatattttgaaatgccacgtactatttttataacatttaaatatattttgaaatgttatgtactatttttataatatttaaatatattttaaaataacacgtactatttttataatatttaaatatattttaaaataacacgtactttttttataacatttaaatatattttgaaataccacgtactatttttataacatttaaatatattttgaaatgttatgtactatttttataatatttaaatatattttaaaataacacgtactatttttataatatttaaatatattttaaaataacacgtactttttttataacatttaaatatattttgaaataccacgtactatttttataacatttaaatatattttgaaatgttatgtactatttttataatatttaaatatattttaaaataacacgtactatttttataatatttaaatatattttgaaatggcatgtactatttttataatatttaaatatattttgaaatggtacgtactatttttataatatttaaatatattttgaaatgccacgtactatttttgcaatatttaaatatattttaaaatgccacgtactatttttataatatttaaatatattttaaaatgtcacatactatttttataatagttaaatatattttgaaatgccacgtaatattttttaatatctaaatatattttaaaatgccacgtactatttttataatatttaaatatattttaaaatgccacgtactatttttataatatttaaatatattttgaaatgccacgtactacttttataatatttaaatatattttgaaatgccacgggctgacccaacgcgctccctggcccatcagccagccgaatccccgttgatatttctcacgtgagcatttttgtgtctcaaggttcgatttagaccgggatcatatagtttagggtgcaaacgacagggatttggacttgagggtttgattcgccgaacctctatgaattcagggtttgaaatggactttttccggcctttttcctcccccacactaccgcaatcgcccaagtagagagagagagagagagagagagagagatccagctatggagattgccatgggggctatcggccctgtcctccccaagctcggcgagctgctcatgggtgagctcaccatggagaagaaagtgagaaagggcatcgagtctctcgtgacagagctgaaattgatgcatgtcgtcctcagcaaggtggccaaagtgccggcggaccagcttgacgagggtgtcaagatctgggcaggaaaagttaaggagttgtcttaccaaatggaggacatcgttgatgccttcatggtgcgcgtggaggatggcggcgagcctgccaacccaaagaacagagttaagaagatagtcaagagagtcaaaaagttattcaagaacggcaaggatcttcatcggatctctgatgctctggaagaagtggttcttcaagctaagcagctggctgagcaacgtcaaaggtacgaactcgtacatgacaccggggttggttctagcattgatcctcgtgtgatggctctatacaaagatgtgacagagctcgttggcattgaagataccagagatgagttgatcaacatgctgattgggggtgatgactggttgaatcaacccctgaagacaatctccattgttggatttggcgggttgggcaagacaactcttgcaaaagcagcatatgacaagatcaaagtgcattttaattgtgatgcatttgtttcggtttctcaaaatccggacgtaaagaaagttttcaagaatattctctatgaacttgacaagcacaagtatgcacacattcgtaacgaagaatgggaagaaaggcatctcattgatgagctcataggattccttaatggcaagaggtatatatgttttttttcctattacgatgaccatttagtaaaataatgagacttttggtctagtatatacgtattctcacatcatatcattgacccactaaaaatagttttctagtgttcatataaattggtcaagttttctctgctgaattttcacttggatgtcatataataattgttaataagatctaaaggttttcttccttgattgaaagattgttcaccaaattactggctagatgccttgtgttggggtttacttgctggatgctttgtgttggattttctagcataacggtacttttctggttaatttattacatacttctaatatacgatgtcacattgggatatttgttgttacatacgtatttttttcctgtgatagttgtttgatttcttttccctattttggatgcttgcagtataagtttaaaattgaaagggagatgtcgtaaagcaaaacttgattgattcccatgtgcgacagagtgcctcttcatgaatattcgtgccgtgccgtctatgtttccacaaggagctgcgccaaggcttaaacaccttcggttcgccttcccagccaagtgggtctcccgtgaaagctttgatttgggcatttctaattttctatgcgtgtcttttccaaatggcatggcaggtagcatagtactcctaggatctagcagatgcccttgacatggattcgatcgtcggcgcctccaacaactcctcctgtactctgctgtttgacctgtctccactctgcatccaaatgaacctcctcattctgtctgcttatgtttggattctcttcacgcttccaacaactcaataaccattatgtttgaggtcgccttccccatgtgtttcgccctcgatgaaccattatttatgatgcactgcctggctggtttgcttgctctcattccgcattgcactgctttgtttggagcagctcaatgttttgtaccagattcgtaaactatgatgtccggttcagtttgccgtattgctttcatgatgaaataaccaggcctgtattaagtacatccttgtattggattacatctggaatttgaatatctcttgcatactactgtgtgccttgttgtcatctagtactctgtgagattattggcccggaactgatgcagtgatttctggatgatataataattcggtatcccttcagtgactaccttaattatacactagtggttgggacgccacctggtggcgccgcttgaggcgtaatgctgcggttgctcatttgctgttgtccattcagccgacttgtttggtccatgtgtttcacaacatgagcatttctagaagtctgagtagataatttttagaaataatgaagttatatgagctgatgcccatcacagattgatatttgttaggaaagcaaacatctactccctctgtttctaaatataagtctttgtagagattacactatagattaaatacagatatatatagacatattctagactgtagatttgctcattttgcttggtatgtagtccctaatggaatttctaataaaacatatatttaggagcggatggagtacttggtgcacatgcattggggacgttaggcatgtgtaactaaactgattatagagataatgaggaccacacagtatagttggttcaaagaggtagttaacacaggaaagaagacctacgaagatacaacctggtggcattgaaactatatttcagactactcttattactttcacatctctccactacccaccattgagccgacgctcgcctttatcatcgcctgcttgagcagctgttcgtcggcgccatcgttggctcgccgtcgtggtactccttgatgaagaccacgtccctcttgcgggctcgccatcgcggtactccttgatgaagactgttcttctcacgccatgttatattatgcagtgtcaaacagagccttggctcagtggttgggcatgcggttgtgcagcctaacgacccgagttcaattcctagaattgacaggtgatgcacatgggttttcccccatttattgaggatcaagtttgatatgtggtgaaactactcatcaagaaatatcttgctactcatttaaaaaaattatgaggatcatgtttatcttggtactcatactaatatggtcgtatgcatccctagttggtgcagaggccgggaagtcaaattctccccatttaattgccattttttaggaaatgcctccgaaggcgaagggggggtcctgcggagagaaggaggcggggctagatgcgatcgtcggtgaggcggatcctggcggttcgggggcgctccccccagcgaggggttcgaacctcgtcggcgatgcggatcctggcgcctctggggcgttcacaccatcggggggttcggacctcgtaggcgtacgggatctccctgttccggaggtgcctgatcgccatgcagattcagtgctcgtcgttactgatcagccctccgctatgcatcgtcgatgggaggtttcttttgaagatgccaccatggccgattcttcgttacatcaggggtttatctccctgaatctggtgtcgttctgggttactgttagggatgaggaagatgacatcttggccggatgttatttgatcgagagaaattgcccttctgttggacaggagttggaaattgatgggtttagggtgattgtgaagaatcagtgcatgactgcggctcgggtggagtcggtgccttgtatcgatcttacctcatcaactaaccgtgtgggaggtcgtttttgggctcttgcagatctggctgacgaggaggaggaggatccggcgtgcgcggaggtggagtctctgacgtgcccaaagccggtgatcaagcgggatatttcaccattgtttccggcggtgaaaacttttgagcggcggcgtagagcggatttctgcctcaacgcaaaggtgcgatcttccaataatctgaagccatggatcggcccgattccaaaggttagtctaccacctctctctctctcggatttttttaagtcagatgcatggaagagctctaccaggagcaagcggctcggccgcagtggctcgtcgccggcggtgccgacggtgagatccgacgcgcgtgattttcagggccagatttttgaattcggctctttcagaggtggggttggatgtgtcttgtgggtttttttcacctcgatctcctgggtataaggcccagcacgagaataccgatgctgagttggactctacatcccttgtgtcccctgggtataaggcccagggagggacggagctcgcggcgtcgttagcagctgctgagttcgactctatatcccttctacccctgggtataaggcctagggagggactgagctcgcggcgtcgttagcggtattagacgggacgcggccgtcgttccctagggttcgtcgaactccttctacgggattcccgcgactgggaacgggacgggcgccccgtgttgatcctttgcgtttggtcaccgggatggctgggcggggctccagcgcctccgctgcttcggcaaagggccctggccagggttctctgcaccctcccgatcgcttcactgctcgacctcctactaagatcgcggcggctccagctgcttctggagggcctgcggcgggggagaggcagccacctcacggtcggtggggagacgatgggttcgacgcttacggcgaaggacagcatcgaggatcgtcgtcagcgggcggcggtcggggctatgcatggcaatccggtggtggcaacaatggatgtttcgccgggcctccaggtaatttcgcaccaggtgtctcgggtcctccacataggagggggctttcgttagggctggggcggtaggggtggcggcaggaaacaaaggccgccggtaccaccttcggctgcccctgcagtggcgggggccgaagctcctgttccttcgaagattgcacagccaggtgtgactgctgtttcggcaccttcaaaagatgcaacttctgcagcagcgggagaggcagagaagatgagctctcttggtaagcccgagggagggatagaccttcaaagtgggctcaaagaaggagaaaatgatgtgctttcgttgtggggaggcaggtcactttgtgtcggaatgcaaggctgatctctgcgagttttgtcttaagccgaagcacggcgatgttcagtgtcctctcacagttggaccaatgccagtggtgaatatctatggtgtgtgttgtcaggagctgatgttctttgagtcaccggcggttttgactgcgagccacgcaccttatgtggcctccacggggatggtaactgtggttcgtgggactatgactgtcgagcaggtggtggggcaactccgtgagcttgtttcttcgacctttcgctgggagccaatacagattgcggataatgtgttcaaagtggtgtttcccaccaaggaggacctaactcgcttgcttaagtttgggatatgtgtagagttccaagtacttcgtgcgtgttagagtttgatgcatggacgagcgaagaacctcaaggtgtggcccttcctcagatctgggttcgtttctctggggcaccgtccaaggccgtgaatgattttctgcttacctggagtttgggatctctgattggcaagatagaaaaggtagacatggtgtttacccgagctaaaggagtggctcgtgtgcttgttagtgtcattgatattgaactggtaccggatgaagtggtctggatgcatgcgggtatgcgattcacactacatcttgagattgagagcccccctttattcgaggagggggaaccgggcaaggatgtggatatgtctgatggggatgatgcaccgggagctaaggagaatgacaagagagacagcgtgactccagctaagaggccgccactggcacaggcaacaggttctcctcgtggctcttcctccgtgacggttcctatgaagcagctccggtttggttcctttggaccggcctcggctccggcgaaagttattggccgcagatcggtggcgtcctttgagggtcttggtcgacggagccggctcttggggaaggagccggttgtcatgtcacaggagcttgtgtcgcctcttatggctatgacaccagtgtctcttgatgcttatcttgtaggagcaaggatgcaggatgcggggtcggtgcatgagcagattttagttagctctcaggttcctatggctgcggcagtagagggggtacctttggcggcggctgatagtcctttggttggaccggttcagcatgaggtgccacatatttctgcagaggaggttattgcgtttggggggctcccggatcccatgactgaggataggcgttccagtcaacgtattcaggagcaaccagatgcggatgacctgcagttggggcatgctatgcgagctgcaaaaaatcagagatgcagaatactcgacaggtatgtcttttaacaaagacaattctattctgtatttttccccgcatgatattatagagaatgctgctgatattggggtgtcactgggttctaatggtacgcaaattttgaaatcaattaatgaccttctagacttagaggtagatagggctcttgacattatacgaaatcttgctgctgttaaacctatgaatgattccgagattaacaagttggggggtctgaatactctatgtgagcatttagatatcacggctgatctcgaggggggagagggtaataacttagagcagacttctgaggagacgctctcttcgcgggtcgacctccaaactcctggttatatggaccaggatgctttggagaaacctaaatgcccttggaaatggaaggtatatccggtttcggtggttagaaggagtgctcggtttaagactgccaaaaaaatttatgatgaaagatgagaggaattttttggaatagcagaggtcttcgggacttggctaagataagatttctttccgaggcaacattagagcatcatctagattttatagcactcatggagactgggagagataatttcacttctcagtttttgagttctttatcagcgggagtggattttgactggcattgtctccctccaagagggagatccgacgggatcttacttggtgtacgatgtgatacccttcaagttcgggaagtgatattgggagattttgcggttaaatttcggattacatccaaagtggatggattccaatgggctctcgttgcggtgtatggggctgctcaaccggagcttaaacctgattttctagctgatctggttcggatctgtgatgggaaattacctcttctgataggaggtgatttcaatattattaggagagctgaagaaaagaatagtgataattttgatggcagatggtcatttctgtttaatactattattgagagcctcgacttaagggagattgaactccctggtaggaaattcacctgggcgaactcccttcaaaaccagacttttgaaaagttggacagggttcttactagcactgactgggaacagaagttccctctagtaacggtgcgtgcgctatagagagctatttctgaccacacacctttgttgctagattccggtagtgctattcatgtgggcaacaaatttggattctcctttgagtcaagttggttcacaagggatgggtttatagatttggttgcgcgggaatggaatcgagacttgggtgggacatccaacgtttatcgatggcaaaataaaattagacatcttagacaataccttcgtggttgggctaagaatatttcaggcaactataaagatgagcaggaaaggctcattaaacttatagatgatcttgaccgtaaggctgagattaatatcctggatggcaatgagcgatccttgaagaatgaagctgaacaacgtcttcggttactcctaagggaggaagaatcgaaatgggcgaacagagctatagttcgggcgattgttcagggggataataatactaaattcttccatttgattgcaaatggcaagcaccggaagaagagaatcatccaactcgagcaagatgagggaacaatagtaggtcatgagaacctaaaattgtatatctctaattattacaaacaattatttggtgcttctgataatagttttgtaactatggatgaacatcaagtggcggatatacctcaagttggagagactgacagtgagttattatccgccccattctcggagaaagaggtgctggaggcaatcggggagatgaagaatggtaaagcttccgggccagatgggtttccggctgagttttacaagaaatgttggcatattatcaagaacgatcttatggcaatgtttcatgatctttatgatggtaagctacaactctttcacttgaattttggtactattacgttattaccaaagaaagagggggcgacacgtgttgagcagtttcgcccaatttgtttgcttaatgttagttttaagattttcacgaaggtgggaacagatagattaacaaagatggcacattcggtggtgcaatctacgcaaacggcttttatgcctggacggaatattcttgaaggtgtcgttgttttgcatgaaacaatgcatgaaatccattcgaagaaacttgatggtgttatcttcaaggtggattttgaaaaggcgtatgacaaagttaaatggtcctttttgcagcaaaccctacgtatgaagaggttcgacgagctttggcgaaagcatgtcgattgttttataaaaaaaggagtgttgggattaaggttaatgatgacgtaggtcatttttttagactctcaagggtctccgacaaggggacccaatgtctcctattttattcaacattgttgctgacatgttggccttgatgatcaaaagggctaagaataaggatctgataggggggctcatcccacaccttgttgacgggggagtttctatattgcaatatgcggatgacaccattctttttatggaacatgatctggttaaagcaaggaatttgaagctcatactttgcttgtttgagcagctatctgggctgaaaataaacttcaataaaagtgaggtgttctgttttggaagagccaaaattgaacaacacacttacaatcagttgttcggttgcgaaactgggaacttgccctttacgtatttagggattcctattcatcaccgaaaattatcaaacaaggaatggaaatgcattgaggatcggtttgaaaaaaagttgagttgctggaaaggcaaacttctttcttatggaggaaggctagtgctggttaattcagtattaacgagtatgcctatgtttctcctatctttcttcgaagttccagtgggggtggggaaaagattagatttttatcgatctcgtttcttttggcaaagtgatgagttcaagactaagtacaggcttactagatgggatgttatatgcagaccaaaggatcaaggaggtttaggaattgaaaatttagagattaaaaatagatgtctactcagcagatggctgtctagaccgtcttcggagactgaaggtatgtgggtacaaattttgaagaacaagtacttacagaacaaatccttatctcaagttacagctcgtccatcggactctcctttctagaaggggttgctgcggactaagaatgctttcttcaatagaactaggttcatcataggtaatggtgaatccactagtttctgggaagatacttggttaggggacttgcctctagcatttcaatatccgcagttgtaccatattgcacaacggagacaggcatccgttgcgtcagtacttagcgagattcctctcaatattcaatttcgtagatctcttattggggatagatggcttagttggctgcatcttgtgagaaggttgatggacgtcaacctttctcacaacccggaccgtgtatattggaagttgacgagtaacggaatattcacggtaaaatccatgtatatgcatctcatagattcaacacctattccaaaatcagcccatatatggaagatcaaagtccctcttagaattaaaatcttcatgtggtttgtgcataaaggggtaattctaacaaaggataatcttgccaagcgaaactggaatggtaatgctagatgcagcttttgtccggataaagagaccattcagcacctctttttcgagtgtcctatggctaaactggtttggcgctcgcttcatattgcttttaacatcactcctcctaatagcataaccacgttttttgggatgtggctacatgaggtggatgtacagtttgctaaacttattcgcgtgggttcctgtgctctcttgtgggcaatttggaattgcagaaatgacttggtgtttaacagacaacgcgatttgcacttcttgcaggttatctacaaggctaccgcactgatccgcacatggtcattactcactcctgtggacgccagggagcctatggttactgggtgtgtccgttgggagatggtagcatagggtatcttcaaccggtttggatggcgtcatattaataggataggtgtttagtcatctatttttttgtcatcaccggcttgggcatgagagatgccttgtatcgttcatttttctatttatttctgaccatatgtactcggataagacttgcttttgatcttaataaatggccgtatgcggatgaccaccccaaccgtcccatccttcgcttacggtgaaacatgcagaaaaggttcgttccggttcctttgctttgacaacaaaggttcagtattcatctttccttcttcatgaggccggggcttcgcctccttttcaaaaaaaaaaaaaaaaaaaaaaaaatctttccttcttcatgttatatacctttctcaggtggactggtggaggagggtttgactaattactagcaccgaactattgtttcatcaattaattactagcaccgaactattgtttcatcatttctttagcctgtgtacgtacttcaatcagatccctgaaactaatgttaccacttattgaagtgtcaagaatattgcaatgtgaattcccgctttggttaattacttatgctgcaaaaaatacgtagcacaagtcttgttatttatacatgctacaatattacatgtaacccgataaaaattagtaacggacaacccaactataataatgaattgctgatatgtgtgcatttttctctatttagatgaactctggtttcttcctttctgaaacattgaactgaagcatttctatgtgtatttcttccgaatggcattgcaggtgtcgtcgacatggattcaatcatgggtgcctccaacaactcttgtactctactctttgacttgtctccctctgcatccggatgaacctcctcattctgtcagccgaggtttggattctcttcacgcttccgtcaactcatgaaccattatgtttgagggcgccttccctgtgtgtttcgccctggatgaaccattatgtttgagggcgccttccctgtgtgtttcgccctggatgaaccattatttatgaggcactgcttggcagtgtttgcttgctctcattccgctttgtttggagcagttcaatgttttgttctagactcgtaaactatgatgtccggttcagtttgccgtattggtatcatgatgaaataaacaggcctgtattaagtactccctccgtcccaaaataagtgactaaaaaataagtcaactatgtattaaatttaatacaaagttgagttacttttgagtcacttattttaagacggagggagtacatctttgtattggattacaactagaatttgaatatcgcttgcatactactgtgtgccttccctgtcatctagtaatctgtaagattattggccctgaactgatgcagtgttacacgcctaccgtaaaaagaatcttaagtcgcggacacagtgtacgtatgtgcctaccgccggatcccttggcggtaggatcacatgcgctaccaccagtccctccgacggtaggccattttcataccggcaagggcctcgacggtaggttattataccctaccgacaagagctccggcggtagcaaaaggtcagatccgaaattttttctcagctagggtcagatccggcttaactttcagcaaaaggtcaaaatagtgaattttaccgccatggagtggatctcgcggtgggtgctccgccggccgccagccctggcctcaggcaaaaaaccattgaagaaacaaagaaaaaaacagaaagatagtagaaaccagagcgaatcgtagccaccatcaaacgcctcgattgaaaaaccatgtcgaatgaaaaaacaaagatgaaactgggctggcccaatgactacacatagaggaaagctttcatgcgagggctgcatatatcttgctaaaagcaagatattttctttttaaaacaaggcaaaatatttgccatttttcattgattaagaagagagttgatcggttaattagaggaataccgagattacaaaccccaaatgggggcacatgggcgacctgatcacaaaatctaacacagtcgaccatagcatcgaggacaagatagctctgattttggcagcgagcttcccaaagaaagttgcaaccctcgcaccgacctagtccatcgcaacatccagagagcactgccagctaaaaaacgccctcatggagtcctcgttgccgcagtggccctgccgcccgcagctacgacttctctgacacagccagcaatcaacatagatgcatgcattgacatatcggaccgtcggcaacggaaggacaagccgcgactcggctctgttcatcaccatagtcgttgccatgcgcatcgcaacgccacaccaacctcgcaccgccggtcgaacacctatcgaccgcaatgccgtgcacgtccaaccactatggaagcgcgaaggagaccatgaacttcaaggtgacgcactcatcgagaagcgatgatgaggcgatgtagtccccaactcacacagagccttgaactttcgcccggaggacatgactcgagatggaggaggtgggagaggtcaacgatgaccctctagggaggagaacgacaccccacaggtgacgcgctgtcggcatcgacaaagccgtgcagattctcctctagagaatcccaatcccctccaacccacgcagccggcgactaagaagagccacaggccgcacgcccactgaaccacgcacctcaagcgtggagacgtcgccatcccatgcaagagcaaccacctcgccgctggcagacaccgacgagccagatctgaagacagatccggcaagcccctaccacaataagaacacacacgccacgagaaaggtccgcacgcggagaggcctccaaggcaggaagagagggccgccacccccacctcaacacgcccgcgagagcaacgagccgcaacccgggagcccatcgacaccgtcaccatggcagcaggcaccgatgacgctgcaccatcagaagcagagcacgcgcgcagagcagccttctgatggctgtaagggggcgccaccctgccccgacgcgccaacgagagcatcgggccgcaacccatggaaccgccgccgccgtcacctcggcagccgtcgctggagacgcagccctggaagcaccgtctctgaggccgtcgtgtcacgtcgcagctgccgtccgtcgcgtggacttcatccggtgacctccgacgacggcagcggcgaggaggagtcggagatgggagaggggtcggcggtggcttgatctagggttccgcccaagccgcccatagaggcgacgcgcgggacgggggatgttggtttccaatcctggggtattgatgctcatgcatgtgtgcttcgtaaaagcaagatatagctccagcgtgaactattagcaagacgagatactttgtgagggaaaactctatttgctgttctgtgcggcaaattgtcggggctatgcacgggaggaattagttggcgaacattccttggcgcgcatcccaacaatcactcccatgtgccgtcacttgttgtgttctcagccgtcgtcacgtgtcgcgttctgagcatttcttttggattatattttttatttttccgcgtgcattttcagctttttaggtgtgtttttttttccttttttggtgttccagggttccatcagtctttcttagcttttggatgaatatgaacacattttttccttccttaagaagcacgatgtttaagtctagttttttcgtgaaaaagaaaattcgtcaaaacctatcaacatgaaatttagttttgaagatctcgacacgagaaattcaatgatgaaaacggttcaagatttagacacatgatttaagagataaaatattttgaaaatatagatctaagaaaaaaaaactagcaggttgcgacaaatgtcacacatataatgcaccacttgatgctaaaaataatataatgcaccacttgtcacttgtcacatcctgaaaagatgtagtgctctttgaaaggaatactctttaattagtgattttgaaaacgcacaaaaagatcgagcaagcgttcttggtgggctggccattttagtgatcccgatttgggagttttccaaaagttttccttttggaaacattctggaaggttcttaaaccattttttcctttctctgttgcttcttcgtttttcttcttttataccttttctgtttctttcctttactttttatattctttcacttttcttttgcaagtttttttaaatattcagaaatttaaaaatgtttgcattttcaagatttgttagattttgtaaaaaatgttaatgagttcatttgttttttgaaattctacaaatatgaaagggattctagcattaccaaccggatcttgttgcacccgataataaacgtttataaatcacttatcaaagtatgtgtccggatagcccaaaatattgatagttagctttaggtcttccattcaagaacaacaaagtgatgtttttatgtctgcagacgaagccaaagcttatggacttgttcttgttgtaggggatgaaatgattgacaagcactaggatactgatccaatgtggtttctagaaatgtataaggattgatagtgtccgaatttcttgtgaaggtttagaatttgaaaaattgctttcttctttcaagaaaatgatcgacaattaaaaaaagcttagatttcatattttccataaatgtttgcattttttaaaatttgttcaaaaattcaaaaatactcctgttttcaaataatttacgtaaatttaaagaatatgtcttcaaaatttgatcacaaattcaaaagtgttaggagaatttcataaaatatttgcatcttttaaactcattattttgagaaatgtctgcaatagcctgacatatagggaacttggaccctatatgtacctaattaagggcaattgtttttaaaaaacctagtctagagatttcagatggagttgcaatgagaacgacgaagtgcctaatcttatactagtaattcctacgtttttaaatataagtattttaagatatttcatcacggattatatatgaatgtatataaacgtattttaaaatataaattcacttattttctccgtatataattcatgatgaaatctttaaaaaaggcttatatttaaaaacagaggaaatagtaagagtaagaaaatgatcctcaagtaaagaaaaggattctccggaaatcacggacgaagagacctggagatctatcagacctcaatttagtttttcacacgtttgtcctagttggatgagaccataccgggcggtgggcccacatggcagtagctctgtgccggcacgtggatagcagagaacagcctgttggctgggaaatgtaccaccggagattagcataagtattctagaggattgtaaaactattatcgcttaattcatgaattgcttttcccccgcaaaaagaaaaaatggagttgcaatgagaacgatggtgtgcccatctttactagtactagtaagaaaatgatcctcaagtaaagaaaaggattctccggaaatctatcagacctcaatttagtttttcacatgtttgtaatagttggatgacacatgggaccataccgggcgggggacccacatggcagtagctctgtgctggcacttgagcggtggaaccatttaacccggcgtttatttctacagcgtttgaagagagggagagagagaacccgtcagtcagagagacacaagtcgagccgtggagtaaatctcgcggtgaccggcccccagctgagctcgtcccgggaccggtgcgtcctgccggccaccggcgacctcgtcgtcgttgagtacgtgcaggtgcagcaagctcggagtggcgcctgcagagccaaagactggatctcgcagagcatgaggtacacttcgtttcttcctgatctggaatctggatccaattaaattggtttcttggactgaactcatgagggtctgcatcttaagtgcaaatttctggtcatacaccatagatcttcctccgttggttctaggtcgtttaatctagtttctccaagtccaagtaccggccggccggtgtgcgcatcttaatccctcagtgcaatcgttggttatccatgttagatttgctcctagggtctgctctaatgaggccatttgttgccagataagtagcacacgcttcactgctgacctctctttgtgataaacatacatcagatgcatcttgatttgtttgccaactaaacgttgcaaaaacttcatcatatccataggtcagtgtggaatgaaaatcacaactgtttgtggacctaaaactgatgccagtgaagaagaaatgaagatgatattattctcttgggatctgctgttccagtggactacctctccacattgtattgttcggtagtgtaactttggtgttgttgctttatatacataaagcagagcgagagcctgtttcctgtttcgagaatattgttatttagctgttaccatcttgactgcaaatcatctgtgattcaccctagatttacattgcttgccataagatgtttttgttcccatgggtccactttttttttcttgccttgataactagctcattattcatatcttctctttatgaatgaatagtatactcatgttgacttgcctgccaactaatctgtttcaaaatcttcacatgcataggtacttgggcttgggatgggaatcacaattgttgtggagtaaatgaagaatatcttgttgtttggctgctaccatcgatgttcttgtagattgaacattgccatgggcgtttctctacgcaaccaatatattagatcaagcatcatgtcatggacatcataagacttttctgccttgatagtgatgtctacgggttggatcatgcctctgtttatgagctcattgaagtaactctcctagctcaaatgggtcgatttcacctttaaatgatacataaatcttcagctatccatcttcatatgaactggtctcgcttaattttgcaatcttctggatatatgcttacatgtaataaataatgtgaaggtagatcatagagcgacaacacaatctttagtcttaaacacattatggtagactagagatagaaaacaataggaaccacacacataccaatgatatggaaagtagcaaagaaatagtaaaagaagatcttgacttttagattatgtcaaagtgataatctggagtcaagcttattttactactagttttgatctaccttgtcatctataggattagttattatatctaagtatgtttttacaagattagaagattaagcaaggttacttgatatgtaaatggatagccgaatgttttgtttatcatggaaaacaagagattagcctatttgagctcggtgatagagttactcaatgagatcataaatagaagcatgattcaaccaatagacatcaatttgatgaaggcatggaaaaatctatcgtgttcatgatatggtgattgatcccatatgtttttgccaagtgaagaaaaccacttacatggcacgagtgaaagcggtctatacgaacttacaaaggcaatgtttcaagattatccttccaaaagagcatgtcagatatgaccaccatcagaagcagcaatgctacaagtgaggtaatttgcagtatctatatctgctattgttgctattgttgatctagtgctgcttatgtcgagtacctgtgctggatttagaataatgtggtgtatgtttattctcatttgaggctgttgaaaattggagaacactaaatttgtcttggcgttttgattcgtcttccctctataaggtcattgtacccacatagtacatacctctgaattctgcaagtttctgcagcgcctattgcatttttctcataatgaacttcctttatttgagaagtatgtaatatgatgtactgttgtcttgttaattcgcctttgaccttttgaatcttcttcgacatgaagtactcattgtgattgtacccacttatgcctgcattatattatcacttctgctgattcaagaaacatgaagtttcagccgtgcctcctgtattatcacttatgccgattcatgaacttccttttccatttatttgtttcgtaaagcagaatatgtgatcttccttttccatttattcattatttaaagtagatcatgtaattatgattattgttgccttgtttgccagctttgattgtccattgcgtctctttcttcctagtagttttcagagttgttttactccagaattgtggaatgaaaatatggtcattcagtttatacaatcatttgaaatttcaccttttatctgtaggggttgctgtttgttttatttgtcgccttgcatgtgtcatgtaggttcaaatttgactaaacaaatgtttgagtgctaagattgaaaaaggaaacaagaaagacataccaggcaaccacaaataataaaattagaagaagaaggagtctaaaaacaaacgataatcttgcttaattactaatataatatcatattcgagtaaaaaaaaatacataaactcctcttctccagaattataatccagtggccaactagattttgaatgcgcagcaacttctaaaaagtagaaatcatgcccacaagaccccatccggactggccatgcttcaacctcaagtgaccagtttctgtgctacaggtacataatgccacatgtgtcgccatgcgtattcttgccatccaaagattaccatgaggggccaaattgtaagcaacattacctttggcatctccgatcttagcattactggcaatattcctactctaccacataccactatcatgaatttaacaatcttctcaactaatgatggcatgtagaggatttctaaggaagaaaacaccaccatgaccataatagcagttccagaaataactggggtgatcatgatgtatatagccaatacgaaggccgtccccaaagataagactccattgaaagataaccatatggatatattgtagtgcatgtagcgcatgggtatttcgactgtaggtgttcctgcaaacacaaggcttaggacggctaaggacgagcatataaatgccaatgcattcgccatcaagaatccttggaatactttctcggtagacagagttggtgttcctcccttagggtggtcatcagctctgtaacccccaggtaaggcaaaagcagcaccaaaagccattgttgtaattaatactaagccaaggccgagaaattgcgttgagtttgatattacagcatcaatcttagcatcagattgggtactaggtccttttttcatgatatcccgccgacaaatctgaagtgtagcatcagcagatattagagcttgttgtatcaaaatccgtgagtgctacagagcagaagaaaagcaacatcaagttatcaactttgtaatttttctctgaatctaggaaataaagtactaaatgaaaggaatagtaaagtattttaccagcaggcagtataacccggtcggagtactgctaactgaaatttctcgcggggtatgttgcttgttgtttggtagattcaaatctacttttttgtttgcgaagagacaagtgaaactccaccaatccccaacctctacagctagatgtaatgcagtgtttccttcattatcttgcttgttcataattgacgaaaacatgggtgtctggcaggcataccgaactatatcatatcttttcttcatgacagcaacatggagaaaagttctcccatgggtgtcacgtaagctggcgcaccctggacactttaaaagtaagatgatgacagatgaaagtctccccgctaatgcagcgacatgtatggggaatgacccttcttcgtcaggttgatatgctgaatatgcatccgcctccagtatttgcatggtaaggtccattggtgtttccactacgttcagaaaacttgtaatactagttccattcaccactggcacggcatattggggaagcatacctcgtgtgccagtttctaatgataccgcaaagtgtagaggtgtatttccatgttggtctcgctttttagtaagctccttgttccagttcagtagtaattttgtcatatctgcaatttggtcctctctgtgtcaaacagtgcaatatgcaaaaatgcatgtgaaagatacatttggaaatatttgatcatttactacaactcttaaatgttatatgtagaagaatgacttggataaataaatctttaacctaggcgtgaataattcgtctccactcaagagggaatctggaattaatatgtgcgtgaaagaaaatcgcacacccctgaaaatattcttgaattgtggaaggccaagatatatataacacgagaaagtaaatggagatcatttactttagtgataggaagtcatcacaagtttgcagtaaaaatatgcttgctattttcccagtaacaaagaggaaaataatggtctagcatatctaatatgctaagtaaatacaattattttacattcaatatgttaagttgtgttgtatatagcaaactaaatactatcatttttatgatcacagcagagtggcatagaacaaacatggaggggatgagtagaaattaatgtgccaagttgggaaatgattaaggtacctctgcttcgaagaactgcagcatgaagagcattctgtccatctggcccggagtatgacaacttcttgtctctctggtagagctcgcgcgcgattttttcatgctgcagagagacggcgaggaacaagggcgaggtcccgctgtctggaacgcgagcgaggaacgggtccgcggtcatcagctcagccaccgtgagcatgtgaccagcgcgaatcgccgcatgcagggctgtctccccgagctcgttctgcatcctcaccagcgtcgtcaccctcccatcttcaccggcgacctcttcccctcttgccagctgaacgaggagagcggccatcggggcgtggctggccctggcggcgcagtgcaacggcgtgctgccgccgctgttgcgtgtgcacaagaggtgcggcgctttgtcgtagacggccctggctttcttcaggtacccgtaggctgctacgatgtggagcgcggagtccccgtctggggtgaccccttccaggagcaaggacgacggtggtgagcgcacggtgccggggcggtcgatgttgacgacgacctcaataggcacgtcggccgctcctccgttcagaaggttcgtcagttccctgcagctgccatggcatgccgccttgagcagctcgggatgcatggcaggtgcggttgccaccgcagtcatgctgccgattttctctgtgtgtgtgtgtggcaccaaaccagagtgacgtctctaggtaaggaattgcacaaaggcaatctaaatcagcagaagattcctttatgcttgacttgggttgcaaggccttatttgcatgcgccaacatgcaacgaacgggcagcagaaaaagtggtatatggaggcactcaaagtatcaatctggctctggtatggtcatctatctatacttatactaatttttttttttttgattgattgcaagtgtttgttggtagcttaccaagctagctgcttggtatctatacttatactaattagagactccctaataattcccacgttaatcagaaaattagagccgctcatctggtgggaccagagttactacggtgtagattaactcatgtagttctgttttttttcttagattagagtgcccacaaagctttcaaggttttagatagaagtaaaaaaaaagctattacaatggcccatagtcctttcacgtacgtttgggaagatagaagccaaaaaaaaaaaaaaattaaattaaattgttaggatatacaattagctagctttccttctcttgcacgacaaacagttaatatccatcttcacatatggttggggaaacagaatccaaacgaaaaaaattgttagagatactattagcgctttccttctttcacaacagctaatttcaatctaatctctcatctctcacgttggagatctgttttgcacaaaagagatacaaatagctttccttctattacgtggaagcagttaatttccatctaatctctcatctctcacattcatggattttttttgcagattcctggatcgccatctctcttgaactctggagcggccgctgcatggcctactagaagcagctgatcatcatctctctcacatctcaagcgtggaggcatgtatggatgtggtgcagcggcatgccgaatatagggccaaaccctagagcttcatggtccaactggggtcctatcctttgccatgcccaccggtactaccataactttgtcaattaaagtcttcaccctgatgtacttctcaatcatgctaattaacctgaccatgtaagctggcgcgcacatcaagatccatcaataaatcaaagaagagttccttcagcatcctactccatgccatgggttcgccattgcagcgcccagcggtacaatacgtatagtttggtgcagccgtgttgctgaatggaagcatatgctgtttttttgcccttgcctattactctccgacgaggaacaaccttggtctgtgattatttgatgcctacagaacatgcacagatacttagaaaggatcaatccaagaacgatttcatggtcggtgctttaattagctagcagccaaacacacacgtacatgtacgccagctgcgcaagcatgctggtcgattgattctggcgtgaaggagcctccgcagcaaatgctttgggcagcaggagacgctatgttttgttctgtaaattctcccacatatttttcccttatgatacttttccatttcctgaagtttaaccggtatatcacgtgcatggatcctctgtgcagacaacaacatggcaggaggctatagcttttcaaaatatctccactagatttttttttgcgggggttctactatttatttccactagatttacattttaataaatagaaataagatgaatatcggctacaatgcagaagtcagatttccattcatttgtatgtactatttggttatacaggatttcatttaagcaaataaactttcatctgtgtgtattaccaatactagatgcattgcgtcactattctcctgctgcattgttatattttgaagacttcaaactgttgtaagaataatcaaattactcgacaaccatgaatattgttgcccgtagtatctactgactattgctcctgttttttatacattttactcgctttgacgacacttatgcagatcaactgaaccagtatgtatagcttatcgaataacttcagatgcaagatatggtgaatttataaggaggtgcttaaacaggaaaacatattaaagcaagaattacacatgcctactaatatatgatcccccgcatcgatttgcgaaagcatgcctagaagcaacctcaacggtacgtagcgctaaatttatatatgaacagccgcattcaacaatttatgatatatatgctatacctttttagtctcttgaaacaatgatatgctatatatgcttccactggattttttactgatgcaaacatatatattgatacaaacataagtcgtgtgcaaatccttattgcctgagataaaattgatatttgcatttgttgcatgtaaatcggatgtgactctaacttgaagattaaacagtttgtgatatgtaggttaaattaaacatgtgttatctcggttacgataccattgcactatcctgacaggtaagggaatcacctcaaaagatattaggttgaggacctatatataaacaggtacgacatgccaatttctatgtgctatgcgtacaaacaatctactggctgaagctattatatttgatgccaaagcttgcatgtttgggtactatgagtttgcctggattatagtccagtgtgcgtgttattaacttgcgaaaacattaagcatattttattttaatttagacaaatatttccttttgaattagaaaactatagtgtttttagctatctgctcctaattaaaaatgttcatttaccctctattttatgtcaggcttgggtacactgaaagatcaattcggagaccttttttgtcacttaatctggccacaagttatgtagtgtactattttcatagaacatggagtgtaatgctgaagcattgcaaatactaatttacatttttcttttagaaatagccctttcaaattatgtttcgaaagatgattggttttttgtatatatacagtttctgcatcttttaccgtttcatagttttcggacattataactaccaactatatttttgaaatgtaatttaaatgtattaaaatcatcagtttgtattgactatggacatctggatcttatgggtgcatagaagtatgtaaataaatgtctgttttgcttttctttagaacatttttcttatatctattttttagtccacctttctcttatatctgatatacctcagatggtaaacaagtggacatgtggaatcaccaggtattttatagtggtgattctcatgttccatgttcaacttttaggtcattttgtaattattaattcttggaatttgataaagatgttgctatcatagtcctctctcattaggtttctattcctcatttgtacaaaaagaagtggaaaatagattaggtatacattttgaaaataacgtgatcaaatgtttcaagttatttctatatgtttctatagtaggtcaactattttctttgaagccttacgatgatccactggctgctaatgaattatattcggtttggtttacatcttagaaatttatgctgagtaaaccataagatgattttgtactatttatattatcaacacaatttacttatttggctaactaataagattaagtaaaagagtgaaggactaagttatggttgttgcaacacactggcgagtccaagtgttcacacaaaacctgagatagtgaaaatatttatctatatattaagtctactttgcaaccatacatgagaatgcattttgtgtctcacatctttagcatgacaactgtatatgtgatgtagtgtaaatctgaggttggattattttcctgaatagtgtccatatttaattatgtaattcatatttcttagtgatttcaatactaacaatatgtttaggtgaatttctgaatttttcaatatttaacatttgtaaatgtgtgtgtacttaatactaacaaatgactagcccgtgccgatgcacgggttgacgactagttctaattaatgaaagagctttgctacacctacgtaataaagaatacgtaacttatgaatgagctggcctggcctgattggataggtaaaaataaggcacagaaaatggtatctgatccagtaacaattcatacaactttctttggatgcagtcttcatgacaatgcatgctcttttgaggttttatattatactacctccgtctcaaaataatcatctcaactttgtactaactttagtatgtgatacatttaactcgagctgcaattttgcagacagttgcaatatttatctcctagtttttttttcattttttgtcttcataactagctcattattcattattcaaaatttattgttgtcttctctttatgaagaacccgtatgcacgtgttgacttgcttgccaactaatcattacaaacacttcaaatgcataggtacttgggcatgggctgagaatcacaattgttgtggatttacaaagatgatagcccagacgaagaataccttgttatttggctgttaccatacataattttatctctccgcaacaaatatattagatcaagcatcatgtcatggacccgataagctttcgctcttctcgtcgttgatgcctaccagttggatcatgcttctgtttacgagctcattgaagcaactctctcctagctcaaattggtccaatttctcctttacatgatacacaaatccttcggctatccatctcaatatcagttagtccctctttaattttgtaatctcctaaaaagatgattgcatataataacggatgtgaaggtagatgataaaaacaacacaatctttactcttaagcaagttgggatagactagagataaaacacaataggagcccagacaaagaataccttgttatttggctgttaccatacataattttatctctccgcaacaaatatattagatcaagcatcatgtcatggacccgataagctttcgctcttctcgtcgttgatgcctgccagttggatcatgcttctgtttacgagctcattgaagcaactctctcctagctcaaattggtccaatttctcctttacatgatacacaaatccttcggctatccatctcaatatcagttagtccctcttaattttgtaatctcctaaaaagatgattgcatataataacggatgtgaaggtagatgataaaaacaacacaatctttactcttaagcaagttgggatagactagagataaaacacaataggagccacacacaacaacaatatgaactgtagcaaataaatagtaaaagaagctcttgacttgtagattatgtcaaagggatgatctagactcaagcttctcttagtaatagtctgatcttccttgtcatctatatggttagttgttatatctaagtatatttgtagaagattaagcaaggtcacttgatatgataatgggtagccgagtgctttatttatcattgaaaacaagagattagcctatttgagctcagtggtagatttactcaatgagatcataaatagaagtatggttcaaccaatagacatcaatgttgatgaaggaatgaaaacatcttattgtattcatgatatgatgattgatcccatatgtttttgccaagtgtgaagagaaccacttgcatggcaccgagtgaaagtggtttttacaaaggcaagatttgaagattatccatctgaaagagcatatccgatatgaccaccatcagaattagcaatggcacaagtgaggtatcttacaatatctatatgtgctattgttgatagtgttgcttatgtcgactacctgtgttggatttagaatattgtgttgtatgtttcatcaatagaggctgttgaaactcgaagaacgctgcatttgtctttcttctgcaagtaaatgaacctgtccttgtgattgcatcctcttatgcctgaattctatcatctcttctatcaactcaagaaccatcaagtttcagcggcgcctcctgtgtttaacttgttatatgaacttatttttccatttctttgtgctgtaaggaagtgtgtaattatgatgtactgctagcagcttgctggttaattttccttggcattttgaatcttctttggcatgaagccctcattgtgattgttccgacttatgcctgaattctattatcacttctgcttattgtagaaacattcagtttctgctgtgcctcttgtattttgcttatgatgaacttccttttccatttaattcttttgtaaggcagaatatgtgaacttttttatttattcattttgtaaggcagagtatgtaattatgatgcagtgttgcctggtttgacggctttgatcatccattgcgtctctttctttctagcagtttccagaatcgtggaatgaaaatatgttcgttcagcttatacaatcatttgacatttcaccttttatctgtaccggactaccggttgcaatttgttttattggttgccttgtatttgtcacgttcgtccaaatttggcagaacaaatggggagtgttattagcctgaactgatgcagcaattcctggaggtaaatgatttggattggcaaacaacacgtgtgcaaaacaaaaacctgtataagtttacactaatgtctccctcactcaatttctaatgatttctgatttttttttacttctgaaaatgtactctcatttgcatgtcacgtacttttacgatgaccaggtacacagccggcacactggtggtcattgctaatctcttagtcagagctggtggtcattgctctctgcagttacaaccgtatttaaatgggtttaaatttgtcatttcctttttttcctccccatacacggcggtgtgggattggttcaccggtggtgccaaagttgattgctccagccaactagccgtgcctgtcttgagtcaatgcacatgggtgttaattattgttcccacatacagaggtcactgttgattgatttctctaccttttcttttgcacaagacaacgacgcacacactaatagtcaccgttggtttcttcctacttttctagctagtttatctcccaggaaaccaagagtgcactctcccaactcccttccacccacataccaccacaacagggtgtagagagttcaagctagcttaaacatggagatcgccatggtggctattaggcctctcctcaccaaacttggtgacctgctcgccggtgagttcaccttggagaagcgtgtgagggaaggcatggagtctcttgtcacagagctaaccttgatgcacgccgccctccgcaaggtggcaaaagtcccgccagagcagctcgatgagggggtcaagatatgggcagcaaaggttaaggagttgtcctatcaaatggaggacatccttgacgccgcgatactgcgtgtggaggatgacggtgagcctgccaaccagagtaaattgaagaagttaatcaagaagatcatcaagttattcaagaatgggaggggtctccatcgaatctctgattctctagaagaagtgatcggtcaagctaagcaattggctgagcaacgtaaaagatatgagcaagagatgcatgacacaagcgttggtgtcagcgttgacccccgtgtgctggctctgtacacagatgtgacagagctcgttgggatcgaagatgcacgggatgagttgatcaacatgttaattgggggtgatgattggttaaagagtcaactgaagacggtatctgttgttggatttggtgggctgggcaagacgactcttgcaaaagtagtgtatgaccagatcaaagtacaatttgattgtgttgcctttgtttcggtttctcagaaccccgacattaagaaagtcttcaaggatattctctatgagttagacaagaagaagtattcaagcattcatagtgcaacaagggatgaaaagcagctcattgatgaactcaatgaatttctgaagagcaagaaagaatttcttaagagcaataatgaattccttagcaataagaggtattattttttgtattgtgtgtaaacatcttcatagcacattgttagtcacccactaggtttgtaatcttcatacaaattcatgaaatgttctctagtgcatttttgcttagataacccatcatttaataatgccttctctacccaaacaaaattcttagatatatctggacccgatttatcaactaactatctgaagcatttaaataggtacctcatcgtaattgatgatatatgggatgaaaaagtgtggcgttttatcaagtgtgctttccccaagaatagtcttggaagtcgagtaatcacgactactcgcattcttaatgtctctgaagcatgttgctcttctagcgatgatatttacaaaatgaattctctttctgatgatatctctagaaggctcttctataaaagagtattttctaacgagaaggggtgccctcatgaactgttgcaagtatccaaagacatcttaaagaaatgtggtgggataccattagccataattaccatagcatgtcttctagctagtaaccgtcagacaaaaacaaaagagcaatggcatgatttgctcagttcaattggtcatggacttacagaagatcacaaggtagaggagatgaaaaagataatattattaagctattatgatttgccatctcatctgaagccatgtttattatatcttagtatatttccagaaaatttcaagatcttaagagttgatttgatatggagatggatagccgagggctttgttcatagtgaaaaacaagaaactagcttatatgagctaggagatagttacttcagtgagctaataaatagaagtatgatgcagccaataggcatcgatgatgaagaaagggtagaagcttgcattgtacatgacatggtacttgatctcatacgtaccttgtccagtgaagaaaactttgtcactatacttgattgtactgagagaaaagtgcctaactcacaaagcaaggttcgcagattatccatccaaaatggcaagatggatgtttctaccaccagcatggcacaagtgagatcccttgctttcttcacacatggtattattgacagagtacagctgaatatctgcagttttcaagttctgcgtgtcttggatttacaaggttgtactatttcagattctgggtacatgaggaatttattgcacttgaggtacatacggctgatgcatgcatatgttgatgagcttccactggaaattggaaagctgcagtttctgcaaacattggacttgagacgagctagtggtataaaagaactaccgtcgagtattgttcgtctacgacatttgatttgtttgtacgttcatgaggacataaatatgccatctggaatgggtaaactcatgtccctagaagtgcttgccggattgatggtaggtcagttatcttccagcaatttcaatgaagacattgcgaaagagctgggccaactgaccaagttgagtgtgctccggtttaaatggagatgtatcaatgacatgactaataaaactctggttgagtccctaagtaacctacacacaatacaaaatctagatatttgtgcagatggcggtcgacatgtcgatctcatgcgtgaaggctgggttcctcccccacagctccatagattgcagtttcagggaaccacctgtgcattccggatgatgccggcatggattaatccttcaaggcttcctttactttcttacctggaaatatgggtggaggaagtgcgaccggatgacattcggctccttgggttgttgcccgctctgcgctctctctccctgatacgcaatactatattctcaggggggcctgcagtggaaatgtcggttgtcaccgctgatgcattcccatgtgcaacggagtgccgcttcatcggtataagagagttagatcattagtgaatgtcagcagtgtcatttcgatgtgaatgcactgtctcatggctagttaagacatacatacaccattgagagcaccaactatttactccctgctggagattatttcgtggtctatggggaacttccctgttcaggccacagccttcgacttgaagaagaactgtatttgggctcttgtggtggtatatggggcggctcacgacgagcataaagatgaattcctaaatgagatgcttgatacctatatcaatattaaaatcccttatatcattggtggggactttaacatcattcgggagtcgatgagaaaaataaaaaccttggtaattcgcagtatattgagaaatttaacaagatcatcaattccttaggcctaagggagatccacatgggaggtggtaaatacacttggactaataaacagaatcaccctaccttagagaagttggacagggtgctgatgagctttgattaggaggatatgttccctctagtttcggtccgtaagcttgttagagatgtgtccaatcacaatcctattttgttgtcatcggatgtcatcagacatgataccaccattgttcctgaatttagattcgagctttgctggttaagtaatgatgatttttacccaaaggcaaaaagtatttgggaacaaccggttggggcagatgatcctattgatgtgcttaatgtcaaactcaagtgagttaagaaatatttcaaaggttgggggtctaattctttcgggcatgataagaagaggaaggctgatattaagaaagagttaggagttattgataggatggaagtagatggccctttagaccctgagttgtacgaaaagaacatagttatatgctgaatttaacgagatctcgtacaaggaagaactcttctggctccaacattcgaacgaatgttggctgctcaagggagaccagaacactgcctttttccatcgggtcgcaggaaaaatacaattcattcgtttgtcaatggggatgtgcaaattgagggcacccccaacctcccggcccatgctactaactactataaagagttgtttggcctagccaggggaatttatttcacttatcgcccgacacatggtctgctgaggagaagcttagtgttgaggataatgatcttctcacttgtgctttcactcaggaggaggttaaaaagccttgttttccatggacagtaatagagacctggtcccgataacatcccggctgagttttataaacactgctaggacttcgttaactcagacttgatgcggctttttgaagcctttcataataacaccctggatgtggcccgactgaattatggagtgattacgttgattcctaaactgaatggggctaaaaaatatagcaatatagaccgatttgtttgttgcgttgtccctataagctgatcactaaggtgctaaattatagggtggctgtttatacagatatcctgatcagcagacaccaaaatgctttcattaaatatagaaacattatggacggcattctgactctgcatgaggtgttgcatgagacacagcgaaggaaaaaagtgttggaaatatgccctagaggcaataataaataagttattattatatttccttgttcatgataatcgtttattatccatgctataattgtattaattggaaactcaaatacatgtgtgggtacatagacaaaacactatccctagttgactagctcgttgatcaaagatggttaaggtttcctaaccatggacaaggtgttgtcacttgataacggggtcacatcattaggagaatgatgtgatggacaagaccgaactattaaacgtagcatatgatcgtgtaagtttactactacagttttatgcatgtcaatgtatctattcctatgaccatgagatcatgcaactccctgacatcggaagaatgctttgtgtgtatcaaacgtcgcaacgtaactgggtgactataaagatgcactacgggtatctccgaagatggctgtggtgttggcatggatcaagactgggatttgtcactccgtgttacggagaggtatctcggggcccactcggtaatgcaacatcacaaacaagccttgcaagcaatgtggctaaagagttagacacgggatcttgtattacagaacgagtaaagagacttgccggtaacgagattgaaataaggtattggataccgacgatcgaatctcgggcaagtaacataccgaaggacaaagggaatggtatacgggattatatgaatccttggcatagtggttcaaccgataagattatcgtagaatatgtaggatccaatatggacatccaggtcccgctattggatattgactgagaggtgtctcaggtcatgtctacatagttctcgaacccgcaaggtctgcacacttaaggttcggtgacgtttcggtatagttgagttataggtggtgaaaattgaagttttgttcggagtcccggatgagatccaggacatcacgaggagttccggaatggtccgaaaacgaagattgatatataggaagtcctgttttggttaccggaaggttttcgggcactaccggtagtgtaccgggaatgacgaatgggttccggatcttcaccgggaggggggaccaccctcccggggttgccaagtggccaaggggtggcgcaccaagtggtgggaccagccacaagtggcccttgcgcaagggaaaagaaaaaccaaaaaggagaaagaaaaaaaaagggggaaaggtgggaaggtggagaaggactcctcctttccaatcctaattggagtaggattggaggaggactccacctcctcctcttggcgcagcccttggggctccttgagcctcaaggcaagcccccctcccctcctcctatatatactaagggtctagggctgatttgagacaacttttaccaagtgcaactcagatctagacagccattcttctccgtttttcctctagatcacgtttctgcggagcttaggcgaagccctgcaggaatagcatcaccaccaccaccggagcgtcgttaggctgccggtgaactcatcaccctccccgtctctcttgctggatcaagaaggcggagatcgtcatcgagctgcacgtgtgctgaacgcggaggtgccgtccgttcggcgctagatcgggacggatcgcaaggcggttcgtgggacggatcgcggggctgttcgtgggacggagatttggatctcacgagcgtaccactacatcaaccgcgttcattaacgcttctctcttagcgatctacaagggtatgtagatccactctccctctcgtagatgatcatcaccatgataggtcttcgtgagcgtaggaaattttttgtttcccatgctgcgttccccaacaaaaagttggtatagtcctcaagctggactttgaaaaagcatatgacaaaattaattgtgactttcttttggagcgtcaccagaatcgtgacttcggtaatacttggtatggttgggctaagaagattctttataacggtacggtgagtatcaaacttaacaatgaaaaaggtgttggaaatatgccctagaggcaataataaagtggttattatcatatttccctgttcatgataatcgtctattgttcatgctacaattgtattaacaggaaacagtaatacatgtgtgaataaatagatcacaatgtgtccctatgtgacatcctcgacttttgtaacagtgataattgtaattaagctacagtaatcgccccgctaatgatgccacgtcatcgacttttgccctcgttgatccgcgttgcgaatgttgtccggattcaaaattcaaacgcgggaaaatgccgtgttatgaacccgtaataagatgtgttaaaagaatgaaattataagaagaaaagtattttaaaagtaaaagaatttaaaagaggcaaaaggaaataaacaaaacaaaaaaagaagtcagtaaaagtaaaagaaataaaggaaacaaaaagaaagtaaaatgaaaaaagaaaaaggttttaaaaagaaaacagaaaacagaaaaaggaaataaagaaaagaaagaaaaaagaaaaacaaaaaaaaataaagaataaccccccctgcctgcgggccccacgtgggcccccctcccctggccaacgcgcgcgccggcgcgtgcccgcgcgcccaaaccccgccgccaatcccgcgctggccccgcccagctgtcggcccaacccaccccgctcgcgccgtgcgctgccgccgcgcaccgggccgcgtgcccgcgccccgaccagcgctcgggccgcgcgcgcgccgctgctcctggccgggccctcgcgccgcgctgcgctcccacctgtcgccgctcgcctcgccctgtcggcgctcgcccgggcccccgtgccccgaccgcgcgtgcgcgcgtcacgcggcgccccgccgccgactctcgcccgaccggccccccccgccttcgcccctggccgccacttggcgcgcccgcagccgctcgctcgcgctggccccacgcgcgcgctcgcccttgtcgccgcgctgtgctgctgctgtttgctgggccccactccttctcccgctgctgcgctcgcctactccctcctcgttgcagtgcactggcactccctctcgtttcatttttgtgcaaagtttctggtgctctctccctttgagctctctcttgcactcttctgctcccacacaaaaatcctaccaagacacccccacctcccggagctcctccccgatggccgacacctccgtggtgcccctccggtgaccgacggccgatccccggagctccgcaccgcgttcgacgtcgtctccgtcaactttctccccgcgcactccggcttccccgggccttctcgtcaccgtcggtgagcctctcctcgggctcgtcccaccaccgcgaagtactctccgccccggttccatcccggctgacggcacccccgttccgacgctcgtagctcccggtatagccgattgaagtcgggaccttcgtagcgttttcgttagatagaaatccctctggaggctactggcattagtttgaggcagtagtatatgcatgtatgtgatttttatgtgtgtagacttgtgtgtgcacttagtagttttggctcccggtgtctctatgacatgcggggcccgccccacaaaattgaaaataaaaatataaaaataaaaatatgatttttattaaatagataaatagataaataaatagatatattaattaattagttaattaattaattaagtgattagataagttattagatttaattagattatgacatgtgggtcccctcatttaattaaatggattaattagtatttaaccataattaaaactgagtcaatgacgcacggggcccacccgtcagttgaccaggtcaacggtgatgtcatcgatgatgtcggcaagtgatgtcagcgatgatgtcatattagtattttaattaaaatgattaaatctatttttaattactaaatagtaataaaactttgttaattaatataaaataatccgtaagccggatcaaaatactttcaacatgaaagttgatcagcgggacgagacgaacccggatacacatcccgttcatctgtcacgcgcccctaacatagcacacctgcaaactttgggctgttttagctaaatgaatagtgcacaaactttattaaataaattcaaattaaattcctaaaagtgctaagacgtttagaaacatggtttaacccccgagccctgcatatttgccatgccatgcatcgtgatgcatttacctgctttatttattgtttcctccccctcttcttaccggtagaccccgaggctgaggctgctgccgggtacacctacgaccctgctggttagccttttgccgcagagcagcaaggcaagcaaatcaccttgatcattcttatatcgcctattccttctctctcatgcttgcattagtatttttgctactgttgtagttagctcctatacctgatgcataacctgccattgataactactgctcctttcctttccttaaacataaaatgtttagtaataggtggagtagtttcccctgagaccccgcagatcagttgctccgctttaatgtcaaatctcgatcgctgatcgacgagccagacttggcaccgcacatacacccccctttgttgtacgacgctacagcgccactgtcgcgtaccgagggtgacacctcgtgaagtactcctgatgttgcctctgtagtatagctagtcggtcctggttatcgaggaggcctcctctttcaccgtttccggcgatgcccttgtcggcaaccccctcaagtgtgggaccctcgaggctgatacctcgggtttcccccgctgatgatacgaccacacagttacttgaccatgttactgggaaacattgtgggacaatgtttggcgggtggattcccgcatgtttgtgttgttggcctaattaaaatgataatggattgagtatttgatctgtgttggtcgggatgaccttgtcgcactaaccttctgcgtgggaagaattatgggtactcgacgtcgtagtatcagccgaagcttttcagatgtcagcatttgtagcggcgcgcgcccgagtggtctggaacgcattcgctcgttgtggggggatgctaggactgatctcggccgcgtacgaatcgtgcaggagcgtggagggcaagtgggcccacgaaccctccgtgcttaggattttaccggcgggctggcctctctgttgagtctgggtggggctgcgacgtgtcgatattccgaggccgggcagtaccctagaaagtgtgtccggccagagtgttatcgagcgtgttgggaactgttgtgcacccctgcagggaagaactaaactattcgaatagccgtgtccacggttacaggacgacgtggagttgtgctttgatcctatacaactacaattgttacttaactggaattgtttgcctcgggatcgcttcctcgcagggagtcgagggaggatctttgggcgtgacctcattattaaattgctgcaacaatatgactatattaattgtattacttgtgttacttgttctactctcgtctattgctgcaagacccttgaagatgctagtcttcgataggactaggcttttccccctctattctcgcattgctgcagttagtccacataaccccctctttggtactgatgcatacttagcatagttttgacgtaagacttgcgagtactttggatgagtactcaccgctgctttgctcccccttttccccgtgacccgttgctgcgaccagatgatgaagccccggagatggagtactccgccgatgatgccagctaccccgacggtgcctactactacgtggaggccggtgacgaccaggagtagttaggaggttcccaggcaggaggcctcgcctcgttcgatcgttgtatcttcttttgtgctagccttctctaaggcaccccatgttatgtctgtactcagatattttatcgcttccgctgactcgtgttctctcgagcttctgtattctagcccttcgaggcccctggcttgtaatatgaagcttgtttattttaatttgtgtctagtgttgtgttgtgatatctccccgtgagtccttgggtttgaccgtacgcatttgtgtgcatgattagcgtacgattaaaccgagggcgtcacaccctagcaagcctctagttggctagctcgttgaccaatagatgatcatggtttcctgatcatggacattggatgtcattgataacgggatcacatcattaggagaatgatgtgatggacaagacccaatcctgagcatatcggtagatcgtgttgttcgtacgctaaagcttttataatgtcaatgtgtcttttccttcgaccgtgagattgtgcaactcccggataccgtaggagtgctttgggtgtatcaaacgtcacaacgtaactgggtgactataaaggtgcactacgggtacctccgaaagtatctgttgggttggcacgaatcgagatcgggatttgtcactccgtgtgacggagaggtatctctgggcccactcggtaggacatcatcacaatgagctcaatgtgactaaggagttagtcacgggatgatgtactatggaacgagtaaaagagacttgccggtaatgagattgaccaaggtatggagataccgatgatcgaatctcgggcaagttctataccgatagacaaagggaatcgtgtacgggattgattgaatccttgacatcgtggttcatccgatgagatcatcgtgaagcaagtgggagccaccatgggtatccagaccccgctgatggttattggccggagagatgtctcggtcatgtctgcctgtctcccgaacccgtagggtctacacacttaaggttcgatgacgctagggttataggaaaatgttatatgaggttaccgaaagttgttcggagtctcggatgagatcccagatgtcacgaggagttccggaatggtccggagacgaagattgatatataggacggatgggtttggacaccggaagtgtttcgggcgtcaccggtaacgtaccggggccaccgggaccaccggaagtggccccgggggtccaccggaagggggccaccaccccgagaggctagatgggccaagtgcgggagggaaccagcccctgggtgggctggtgcgcctcccacacccagcccaaggcgcaggggaggtggagaggggggctaaccctaggagaggtgggcctaaggcccactagagggcgccaccacccctcctccctcctggccgccgcacctcccccccatctggggctgccgcccctcccaggagggggaaaccctcaagggggtgcagccctaccctccccctatatatagtggggatttctggcctctgggacacacaattttccctttccgtcggcgcagccctgctcttcttcctcctcatctctgtcggtgcttggcgaagccctgccgggagagctcgtctctccatcgacaccacgccgtcgtgctatcggagaacttccccaacctctccctcctccttgctggttcaaggcgcgggagacgtcaccgggctgcacgtgtgttgaacgcggaggtgccgtggttcggcactagatcggaatcacgcggcgatccggattgcagcgagtacgactacatctaccgcgttcttgcaacgcttacgctaggcaatcttcaaaggtatgaagatggactcacccctctctcattgctggtctctacataggaagatcccctttgcgttggaatttttttgattttcgctacgttacccaacagtggcatccgagccaaggttctctatgcatagattcgtagcacgagtagaacacaaaggttgtgggcgatgatcttgtcaattgcttaccactactagtcttatttttttccggcggtattgtgggatgaagcggcccggaccgactttacacataaccacgtgagactggttccaccgcctgacatgcacatggtgcataaggtggctagcgggcgtctgtctctcccactctagtcggattggatttgatgaaaagggtccttatgaagggtaaatagctttagcatatcatcattgtggctgccacgtagctaagaacgcgttcttgctagaaacccaaatcagccacgtaaaacttgcaacaacaattagaggacgtctaacttgtttttgcagggtatgacatatgatgtgatatggccaaagttgtgatgtgacatgtgtgatgtatgagatgatcatgttattgtaataggaatcacgacttgcatgtcgatgagtatgacaaccggcaggagccataggagttgtcaaaatttattgtatgagatgcaacgccatgttttcattactttactgcattgctaatagttagctatagtagtagtagtaacagttggcgtagcaactctatggagacacaatgatggagatcatgatgatggtgatcatggtgtcatgccggcgatggtgatgatcatgcgatgccccgaagatggagatcaatggagcaaagatgataatggccatatcatatcattgattgattgcatgtgatgtttatcatgttttacatcttattgcttagaacgacggtagctaataagatgatccctcataaaatttcgagaacgtattcccctaagtgtgcaccgttgcgaaggatcgttgtctcgaagcatctcgtgatgatcgggtgtgatagattctaacgttcgaatacaacgggtgtaagccagatttacacacgcagaacacttaggttgtctcgacgagcctagcatgtacagacatggcctcgaatacaagagaccgaaaggtcgaacatgagtcgtatagttgatacgatcagcatggagatgctcaccatcgataactagtccatctcacgtgatgatcggacacgggctagtcgacgtggatcatgtaacacttagatgactagagggatgtcaacttaagtgggagttcatacataatttgattagatgaacttaattatcatgaacttagtctaaaagttgtcttacaaatattgtagatccaatggccaacgcacctgtcaacctgaacttcaacgcgttcctagagaaaaccaagctgaaagatgatggtagcaactatgcggactgggtccgcaacttgaagctcatcctcattgcagccaagaaggcttatgtccttgaagcaccactaggtgaccctcctgttcccgcagccgcacaagacgttctgaacgtctggcaagtgcggagtgatgactactctctggttaagtatggcatgttatacagcttagaaccggggctccaaaggcgttttgagcaacacggagcacaggagatgttccaggagctgaaatttgtttttcaagctcatgcccgggtcgagagatatgaagtctccgacaagttctttagctgcaagatggaggagaacagttctgtcagtgagcatatactcagaatgtctgggttacacggtcgtctgactcagcttggagtcgaacttccggatgatgctgtaattgacagaatcctccagtctctcgcaccaagctacaaaagttttgtgctgaattacaacatgcaagggatggagaagaccattcccgagttgtactcgatgctcaaatctgcagaggtagaaatcaagaaagagcatcaagtgttgatggtcaataagaccaccagtttcaagaaaggcaagggtaagaagaacttcaagaaagacggcaaagctgttgccgcgcccggtaaaccagttgccgggaagaagaagaaaaatggacccaagcctaagactgagtgctactactgcaagggaactggtcactggaagcgaaattgccccaagtacttagcggataagaaggccggcaacgttaaaggtatatatgatatacatgttattgatgtgtacctaaccagcgctcgtagtagctcctgggtatttgataccggtgctgttgctcacatttgcaactcaaagcaggaactacggaataagcggcggctggctaaggacgaggtgacgatgcgcgtcgggaatggttccaaggtcgatgtgatcgccgtcggcacgctacctctacatctaccttcgggattagttttaaacctcaataattgttatttagtaccagctttaagcatgaacattgtatcagggtcttgcttgatgcgagacggctactcatttaaatccgagaataatggttgttctatttacatgagtaatatgttctatagtcatgctccgctggtgaatggtttatttctaatgaatctcgatcgtgatgttacacatattcatagtgtgagtaccaaaagatgcaaagttgataatgatagtcccacatacatgtggcactgccgctttggtcatatcggtgtcaaacgcatgaagaagctccatactgatgggctgttagagtctcttgattttgaatcatttgacacatgcgagccgtgcctcatgggcaagatgaccaagactccgttctcaggaataatggagcgagcaactgacttattggaaataatacatactgatgtatgcggtccaatgaatgttgaagctcgcggaggctatcattacgttctcactctcaccgatgatttgagtaggtatggatatatctacctaatgaaacacaaatctgaaacatttgaaaagttcaaagaatttcagagtgaggtttagaatcaacgtgacaagaaaataaagtgtctacgatctgatcgtggaggcgaatattgagtcacgagtttggcacacacctaaggaaatgtggaattgtttcacaacttacgccgcctggcacaccgcaacgtaacggagtgtctgaacgtcgtaattgcactttattagatatggtgcgatctatgatgtctcttaccgatttaccgctatcattttgggatacgccttggaaactgcagcattcactttgaatagggcaccgtctaaatccgttgagacgacaccgtatgaattatggtttggcaagaaacctaagctgtcgtttcttaaagtttggggctgcgatgcttatgtgaagaaacttcaaccagagaagctcgaacccaaagcggagaaatgtgtattcataggataccctaaggaaactattgggtacaccttctatcttcgatccgaaggtaaaacttttgttgccaaaaacggatcctttctagagaaagagtttctctcgaaagaagtaagtgggtggaaagtagaacttgatgaggtaaccgtacctcctctcgaaccggagagtagcgcagcgcgggaagttgttcctgtggcgcctacaccaactgcagaggaagttaatgatggtgatcatgaaacttagaatcaagttactactgaacctcgaaggtccacaagggtatgctccgcaccagaatggtacggcaaccctgtgatggagatcatgttgttagacaatgatgaaccttcgaactatgaagaaacaatggcgggcccagactcctacaaatggcttgaggccatgaaatccgagataggatccatgtatgagaacaaagtatggactttggtggacttgcccgatgatcggcgagccatagaaaataaatggatctttaagaagaagactgacatagacggtaaagtgaccgtttctaaagctcgacttgtcgcaaagggttttcgacaaattaaaggaattgactacgaagagactttctctcccgtagcgaagcttaagtcagtccgaatcatgttagcaattgccgcttttcatgattatgaaatttggcaaatggacgtcaaaacagcattccttaacgggcatcttaaggaagagttgtatatgatgcaaccggaaggttttgtcgatcccaagagtgctaacaaggtatgcaagctccagcgctccatctatgggctggtgcaagcatctcggagttggaacatccgctttaatgaggtgattaaagcgtttgggttcatacaggtttatggagaagcctgtctgtacaagaaagtgagtgggagctctgtagcttttctcatactatatgtggatgacatactattgatgggaaatgatatagaactattgaagagcgtaaaggcctatttgaataagagtttttcaatgaaggaccttggagaagctgcatacatattaggcatcaagatctatagagatagatcgagacgcctcataggtctttcacaaagtacataccttgacaagatattgaagaagttcaatatggaaaactcaaagaagggcttcttgccagttttacaaggtatgagattgagtaagactcagtcgccgaccacagcagcaggtagagagaagatgaaaaccatcccctacgcctcagccgtgggctctctaatgtatgccatgctctgtaccagacctgacatcaaccttgctataagcttggtaggtcggtaccaaggtgatcccggtatggaacactgggcggcggtcaagaatgtccttaagtacctgaaaaggactaaggagatgtttctcgtatatggaggtgacgaagagctcgtcgtaaagggttacgccgatgctagcttcgacacagatccggatgactctaagtcacaaaccagatacgtgtatgttctgaatggtggggcagtgagctggtgcagcagcaagcaagatgtggtggcagcatctacatgtgaagcggaatacatagctgcttcggaagcagctcatgaagggatctggatgaaggacttcatcaccgaccttggagtggttccaagtgtgtcaggtccgatgacactcttctgtgataacactggagccattgccatagccaaggagcccaggtttcacaggaagaccaagcacatccagcgccgcttccactccatctaggaccaggtccagaggggagtgatagatatttgtaagatacacacggatctgaatatagcagacccattgactaaacctcttccacgagcaaaacatgatcaacaccaccatgctatgggtgttcgattcatcacaatgtaactagcttattgactctagtgcaagtgggagactgttggaaatatgccctacaggcaataataaagtggttattatcatatttccttgtaatgataatcgtctattgttcaggctacaattgtattaacaggaaacagtaatacatgtgtgaataaatagatcacaatgtgtccctagcaagcctctagttggctagctcgttgatcaatagatgatcatggtttcctgatcatggacattggatgtcattgataatgggatcacatcattaggagaatgatgtgatggacaagacccaatcctgagcatagcggtagatcgtgttgttcgtacgctaaagcttttataatgtcaatgtgtcttttccttcgaccgtgagattgtgcaactcccggataccgtaggagtgctttgggtgtatcaaacgtcacaacgtaactgggtgactataaaggtgcactacgggtacctccgaaagtatctgttgggttggcacgaatcgagatcgggatttgtcactccgtgttacggagaggtatctctgggcccactcggtaggacatcatcacaatgagctcaatgtgactaaggagttagtcacgggatgatgtactatggaacgagtaaaagagacttgccggtaacgagattgaacaaggtatggagataccgacgatcgaatctcgggcaagttctataccgatagacaaagggaatcgtgtacgggattgattgaatccttgacatcgtggttcatccgatgagatcatcgtgaagcaagtgggagccaccatgggtatccagaccccgctgatggttattggccggagagatgtctcggtcatgtctgcatgtctcccgaacccgtagggtctacacacttaaggttcgatgacgctagggttatagggaaatgttatatgaggttaccgaaaggtgttcggagtcccggatgagatcccggacatcacgaggagttccggaatggtccggagacgaagattgatatataggacggatgggtttggacaccggaagtgtttcgggcatcaccggtaacgtaccggggccaccgggaccaccggaagtggccccgggggtccatcagaagggggccaccaccccgagaggctagatgggccaagtgcgggagggaaccagcccctgggtgggctggtgcgcctcccacacccagcccaaggcgcaggggaggtggagaggggggctaaccctaggagaggtgggcctaaggcccaccagagggcgccaccacccctcctccctcctggccgccgcacctcccccctcctggggctgccgcccctcccaggagggggaaaccctgaagggggtgcagccctaccctccccctatatatagtggggatttctggcctttgggacacacagttttcccttcctgtcggcgcagccctgctcttcttcctcctcctctctgccggtgcttggcgaagccctgccgggagacctcgtctctccatcgacaccacgccgtcgtgctttcggagaatttccccaacctctcccttctccttgctggttcaaggtgcgggagacgtcaccgggctacacgtgtgttgaacgcggaggtgccgtggttcggcactagatcggaatcacgcggcgatccggattgcagcgagtacgactacatctaccgcgttcttgcaacgcttccgctaggcgatcttcaaaggtatgaagatgcactcacccctctctcgttgctggtctctacataggaagatcccctttgcgtaggaatttttttaattttcgctacgttaccctacagaaggaccctacttctagagtcacaaaggggtgcgctagggtgaccccttttctcctttttctattcaatcttgcggtgcggatgcctcaaactggcctcaaacatccaggctgaccgacacccccatttctagctcaaatatgggccggatatgggggagcccgggcgcgcctgggctcgcccgcctggcccgtgctggcccgcatctactccacaaatattcttctccatccgctcgccggaccaaaccatagccacttcactttactccgttccactctcatccgccagccaagctcaattccggcatggcgggcagcagatctacgtccttcacctcaagatccatcgaccacgagctcgtcccacgcagccccgaggaggagatggccgtccggttgtgctccgccgctccgaggaggcggccacacgacgacagcgctcggactcgcaacgccaggaatccattgcgctcgcacaaccggtgcttcgatctggcgtcgctgcctcaccggaggcggtgcggtccatatggcgttcagacccctttgttggcacgccgatcatgaagcatggccgtcctcgaacgatgtcatggcgcggtgtgcccgccgggcaaggcagcgcgggcacgggatgcggtggtggctgttgaagaggcggagtcacactctccggcgcctcataggatgcttctgtgcgggcgacgcaaccgtttcgtggtggacgtcgactcctcctaggaaggatccgtcatcgacctcacatcgactggcaccatctgggttacgggctcccatgaggaagagtagggcatggaagacaacgggagctcaactcccctgagccggctagtgtcacttgttctacattacctcattggcgatcggaccgacactgtgaggggcatagccagctgccggacatgatcacggtgaagccggacgagctccgcttagtattagacttatgttgtatgtaatattatgtatttaaagtttttaatttaaggtattcgtatgtggaatttattattatttaagacactggcgtcccgatgtttgaggggtcgaatttataagatccggttgtacatgctcttaatggaaaatcctatttggcgcgtgttgcggcaaattgtcgtggcttcgcacaaacaaatgcaagctaggatgatctaggccggcctattaacagttgtagggaagccggttttggaaaccttctagactttcccagccggtttttttcgcttttaggaactttctagaagattccctgagcctgttttttttcttctttttttcgtttctttttcgtttgttctttcctcttttttttctgtttttgtttcaaaaatgttctggattttcaaaaaatgatctggattttccaaaaatgttcgggattttcaaaatttgttcttcaaattcaaaaattattatgtgtttttagaaaaatgttctgaattttcaaaaaatgtattgggttttcaaaaaatgttcttcaaattcagaaaatgtttctgcttttttcaaaaaaatgttagggattttcaaaaaatgttcttcaaattcaaaaaatgtttctgtttttaagaataatgttcttcaggttgttatggctggagatagataggccaaggctgttagtcggttgttagctagtttattttctctctatctcatgtaacggtataccttatctcttcctccccaagtcatgatcagctgtctataagaatgtacaataaaggtgaatgagttgtctataaaaaataaactagtatatttttttcttagttggagaaaagagaagaagagagagaaattaagcgggctcttagttaagagtgagctctaacacgccctcttaggcactttataagagagtgaaaggtgagtcatataataaaaatgtattatacatttctaatcaactattgtacatgttgactataagatgatttataaatgacatgacaatgacttatactcagcagctggctatactattaaccatgctctaacgtgtcagatttgttacggctgtagatgctcttacatgactttagcacggtgtgaatggcttggaccctggtaccgtgctcaacattaatccccatcgcgtcagtccagcagtggccaacctctggtgcagtccacatgaccatcagcgaccatggccctgtttggatactctaactcgattagaggttagagttagattctaaccctggactaaccctgaactaactctaatcaaagagtgttcggatggtacggttagattgtcaataaatgcacctttgtcaatcatttgactcttttaataaggatttggtgtggtggaggtagaggaaaaagtaactttttgtgggtcctacctaactctaatccaaataaacacctcttgggtgggttagttcttttgggtgggttagatgcatctaaccaactctaaccctcctgttaggatgttttgggattagttcagtccaatctaaccaactctaactctaatccatggatccaaacagggcctatgtctcggcccggtcggttggtgtcgaaattataagcctttgtgctgctcacaacgtttatctcttccttgcacagaacaaacaatcattggctctgtttggatccatgggttagtattagacttatgtgtatgtaatattatgtatttgaggtttttactttaagatattagaatgtgaaatttattatctgaaatactcacgcacgggtgtttgaaggactagatttataagatccggctgtagatgctcttaatccccacggcatcggtccagcagccaccagcctgtggtgcactgcacatgaccggttggtggcaaaattaaaagcctttatgttgctcacaacgtttatctcttcctaaggctggccatagtgggagtaacttaggtagtatcatgtacttgggactagtaaacatggtgatgtggcagacaattaaagaagagataaagggttagagtaacatagtagatatcgtaacatgttaaatgcaatgctactatgtgtcttgcatgtcaataaatgaggtcatctatgatactattttatgatactatgcattatagaggtagtatcatacaataatatcatatgcataatactactatatgatactccccactatgaccagcctaacaccgagcaaacaatcattgatctgaacccatctcatcttctccagaacaaatacactccgaggagaggccttggtaggaacaacacacacacgaaaacccaagtctgctctcgggctcatctgcttcttgtcacaaaaaaaatcaaaataagtaatagaaaaaatttaaaaattctatttttttccgtggtagataatttgatgtgtgaggtccgctttaaattttaacttatttgaagatctgagcagctttcgataaaaaagacaaatcgggtcaaaacagttcatgaacagctaaccttttttacagaccctgatttatttttttcgctaagagctgctcacgcatcaaattatctaccacacaaaaaaaattggtctcttttgaatttttctactatttgttttgatttttctgaccgggagcagatgagcccgggactgctcatatgtctaaataagctaaaatttagagcggacctcacgcatcaaattatttatcatatattttttttgaaatttttctactatatgttttgatttttttcgtcggcgcgggtgcagctgagctcgggagccaaatcgtcgcttccacacatacatcagctttcttcctcaccacactaccgcattttgaggtgtaattattttgtttataggttgggtccagtggggctaggctctgtgatccgtttaattcgagctgcagttctgccgacagcaacgcgtgatgccacagttgcattgatcagtggaaggcgtggacactggtggccgtcgtgctctactttacatgactttgccagtgtgaaccgcttggacactggtggaggcgcatctgtgctcaactttaatccccagcgcatctgtcctagtgtggtggcggaactaaaagcatctgtgctgctcacaacgtttatctcttccttacacacaagaaacaatcattgatctgaacccagctcatctccagaacaaatacactgagaggagaggccttggtaggaacagcacacagacaccggcctttttcctccccacactaccgcaatcgcccaagtagagagagagagagagagagagagagagagagatccagctatggagattgccatgggggctatcggccctctcctccccaagctcggcgagctgctcatgggtgagctcaccatggagaagaaagtgagaaagggcatcgagtctctcgtgacagagctgaaattgatgcatgccgtcctcagcaaggtggccaaagtgccggcggaccagcttgacgagggtgtcaagatctgggcaggaaaagttaaggagttgtcttaccaaatggaggacatcgttgatgccttcatggtgcgcgttgaggatggtggcgagcctgccaacccaaagaacagagttaagaagatagtcaagagagtcaaaaagttattcaagaacggcaaggatcttcatcgcatctctgatgctctggaagaagtggttcttcaagctaagcagctggctgagcaacgtcaaaggtatgaacgcgtacatgacaccggggttggttctagcattgatcctcgtgtgatggctctatacaaagatgtgacagagctcgttggcattgaagataccagagatgagttgatcaacatgctgattgggggtgatgactggttgaatcaacccctgaagacaatctccattgttggatttggcgggttgggcaagacaactcttgcaaaagcagcatatgacaagattaaagtgcattttaattgtgatgcatttgtttcggtttctcaaagtccggacgtaaagaaagttttcaagaatattctctatgaacttgacaagcacaagtatgcacacattcgtaacgaagaatgggaggaaaggcatctcattgatgagctcgtggaattccttaatggcaagaggtatatatgtttttttttcctattacgatgaccatttagtaaaatcatgagacttttggtctagtatatatgtattctcacatcatatcattgacccactataaatagttttctagtgttcatataaattggtcaagttttctctgctgaattttcacttggatgtcatataataattgttaataagatctaaaggttttcttccttgattgaaagattgttcaccaaattactggctagatgccttgtgttggggtttacttgctggatgctttgtgttggattttctagcataacggtacttttctggttaatttattacatacttctaatatacgatgtcacattgggatatttgttgttacatacatatttttttcctgtgatagttgtttgatttcttttccctattttggatgcttgcagtataagtttaaaattgaaagggagatgtcgtaaagcaaaacttgattgatttttattagaatatgctttgtgcatttgaaatgtatcaggcaagcacttagtttgaaaaattatatacttaactcgcacatttacaatactagattatctatactgttgatatatttggcacaaatgttttccctgtgacagttgtttcagggttttccctaatatgagtacttggaaagttgaaatacacatcaaaattatacataatgcaaaaatgaaactttgttgaaatttaatttagtatgcttatccttttaagatagttggagtgtgcatacatacctaagcatgcccatagtaaaaatacttaggcataacttgacccatgcaatcaacctaatcataaacagactaaatgcatgcacatattcaccacatccaagctaaggcaaaaaaggtatattgtttggtttttatgcacataatgacgggtagactgagcacacaatgaaaaaaaatggaagaccccaagccttatgaaaacttgaaataacttggataatataatttggcttaacatggcaacttctaaaaatcttgtattgtgattttatatattattttacatatcttcattgtaccgatcatttgactaatttttaaatttactcacaaaggtacctcatcgtaattgatgatatatggagtggagaagcatgggagttaattcagtgtgctttctccaagaagagtcctggaagtcgactaattacaacaacccgcatttttagtgtctctaaagcatgttgctcttccaaggatgatatttacagaatggaacccctttctgatgatgtatcaagaagacttttctgtaaaagagttttttctcatgaggaagggtgtcctcaagaattgctgcaagtatcccaagacattttgaggaaatgtggcggcataccattagctattattactgtagcaagtcttctagctaataagcatgagataaaagaaaagtaccaatggtatgctttgctcagctcaattggtcatggactcacagaagatcgcagtttggagcagatgaaaaagatattattattcagctactatgatctaccttcgcatctgaaaccttgtttgttatatcttagcattttcctagaagatcaagtgattatgagagatagactgatatggagatggatatcagaaggatttgtttatagtgaaaagcaagatattagcttatatgaactcggtgatagctacttcaatgagctagtaaacagaagtatgatccagcccttaggcattgataatgaaggaaatgtaaatgcttgccgtgtacatgacatggtgcttgacctcatatgctcattgtcaagtgaagagaactttgtcacaatattagatgacaccagaagaaaaatgcgtaactcagagataaaggttcgcagattgtccattcaaaatagcaagatagatgtgggtaccactaggatggagcatgtgagatctgttactgttttctcagataatgttgttgataaagtgttggatatttcaagatttgaagttctgcgcgtgttggatttagaaggttgtgatgtctcagatgttggttatgtggggaaactattacatttgaggtatttggggctacaagatactcctgttagggaccttcccatggaaatagggaagctgcagtttttgcttaccctgaacttaagaggtactaagatgaaagtattgccgtctagtgttgttcagctaagacgtctgatgtgcctgtatgttgattatgatatgaagctgccatctggaattggtaacctgacttccctagaagtgctagatgaactggggttatctgaagtggaccttgattttgtgaaagaattgggccatctgaccaagctcagggtgctccggcttgacttggatggttttgatgagagcctgggtaaagctttggaggaatccattggtaatatggacaaactgaacagtctagatgtatatgtcgatcgtggactcattaatttcctgagcgaagattgggtgcctcctccacaactccgcagattggctttccagtcagatggaagttggttcgagacattgccgtcatggattagtccttcatctcttcctctcctctcctatctggctataacggtgtttgaagtgcgatcggaggccatccagcttcttgggactctgcctgctcttgtttttctcgagataatgaattattctgtgtacggggaagcacatgaggtggaagctttcccacgtgcgttattcccacgtgcgacaaggagctgcgccaaggcttaaactcctttggttcgccttcccagccaagtgggtctcccgtgaaagctttgatttgggcattcggcacctcccttccctggagcgagtccatgtgcaagtttttaaggaggaagctagcgatacagaggtggatgaagcggagggccgcagcggatgaccatcccaaccgccccaccctgcgcatcatcaggaaaaggtccgcactgccgtgctacgtacatttttcgaaaggccgaagccgatctttattaagattagaaagaacagttacagtgcgtgctacgtacatttgttctggtctctttgtgttttcaacaaggttcagttctcatcttccttattccttctccttttcccttttcaggtagagcagggattgatttaccaagtactgcacgcaggtactacttactccatcaattaattactactattgcccaactattctttcaccattcctttagcctgcgtagttcaatcaggtttctaaagcgtagcgttgccgcgtatttaaagcgtcaagaatattgtaatgtgaatttcgctttggttcaatcaggtttcagcacaagtcttgttatttatgcatgatgcaaaattacatgtaacatgattaaaatgaaccgacaaccctacagtaatatagatacatgttccttttttctgtacttggatgacctctgctttctttctttctgaaacattttaactgaagcatttctatgcgtgtctcttccaaatggcatggcaggtagcacggtactcctaggatctagcagtttcccttgacatggattggatcgtgggcgcctccaacaactcctcctgtactctgctgtttgacatgtctcccctctgcatccaaatgaacattctcattctgtctgcttatgtttgggttctcttcacgcttccgccaactcaagaaccattatgtttgaggtcgccttccccatgtgtttcgccctcgatgaaccattatttatgacgcactgactggctggtttgcttgctctcattccgcattgcactgctttgtttggagcagctcaatgttttgtaccagattcgtaaactatgatgtccggttcagtttgccgtattgctttcatgatgaaataaccaggcctgtattaaatacatctttgtgttggattacaactggaatttgaatatatcttgcatactaccgtgtgccttcgttgtcatctagtactctgtgagattattggcctagaactgatgcagtgatttctggatgatataataattcggtatcccttcagtgactaccttaattatagatggagcaaatcataagacttttcttgcgtgtgatgatgcaaatcatacgatttaatgcacatgaagacccgcttattaccaactcaataagttcatgtactgatatcatgacaatatcttgttatgtcccccccatcagacttgcttttgtttatgtgtgtgtgtgtgtgtgtgtgtgtgtgtgtgttgcccccttgtcgccgtcgagctacaagtgtttattcgtttgattctgctagtattccattgcaataattagccagctctagccgagagtgcagccgagatccgatgagttgtttcaacagaaatctaaccgaagctgaaaacctgaaacccagttcaacaacaaaacagaggcagtatcttttctgtctagtactttttctacataattcctggcgctgtcgaaacactgcgagttggttacttttgcccgctcctgggttaaaaactactaccatccccacaaaaaaaagagttaaaaactaccagtcaggaattcagatttagcaccacattcattttccctgtgaacacatgaattgtccgctcgatcagtgcattctctgtgcgattgtgagtgtcttgtgttgcccccggaatgtgatcgttggattcagaattcaggaggatgtacagctacctcgtacgttgcttccttcggtccttccctctgcctgagagtcgagtttcatcagcattcagttcgtgagatattcggaattttcgtcaccttctgtttgtatttctttctcactggttttccttgcattttgttcagcttaccatctctatcatatttatcttctgtagaactgggaattgctttaactaagataaggcgagaggactccactttcctgttatttagacctgttcatccacttctctgttatccctgagacctcaacttcgtcttagttgttcgtgtttttgcgtaagttacagttactgggtgacacatgggaccatgtcatgtggacgaccacagggcagcgtctatgtacgtgcatgtgacggcctctgcttccgacgattatttctatcacgtttgcagacatacatacagagtcagtatgtatgtctcagagagagagagagagaggccgagccttggagtgaatctccggagggggctccgccagcctcaggcaaaaaaaaaaaacctttgaaaaaaaccaaaaaaaaggagaaagatcatagaaatcaagcatcttgattgaaaaactagatcgaatgaaaaaataaagatgaaactgggctggcccaatgactacacgtagaggaaaggctttcatgcgagtgctgcatatatcttgctaaaagcgagatatagctccagcgtgaactattagcgagacgaggtactctctcagggaaaaccctagttgttgttcgttccagcaaattgtgagggctacgcacacggagatcgcgtaagcattttgggtgggctggccctttttttagttatcccggatttgggaggttcccacaagtttttattgaaaccttcttgaaggtttttaaaccattttttcccttttatctgtttctttttcattttacttcttttatgcttttctattccttttttcttccctttcctttttatattctttcatttttattttgcaagttttctaaaatgttcagaaattttaaaaatgtttgcatttcaagatttgttatattttgtaaaaataaaaatgtgttcaatttttttggaaattctataaaggtttagaacttaaaaaatatttttcttctttcaagaaaattatcgacaattaaaataagcttagatttcatattttccataaatatttgcattttttaaattttcttcacaaattcaaaaatatttctgttttcaaatgttttacataaatttaaaaaatatgtcttcaaaatttggttgcaaattcaaaaaatgtttgcagcattccataaaatgtttgcattttttaaaacccataatttcgaaaaatgtccgcaatagctcccctacacttgcgggtcatcatgctccacttgaacttgcacactgcaatcttgatgacaatcaccacttgatgtcatccttcataggttgaatgagatcttcctcttgacgtaaacccatggaaatacacctaaccccacatagagctctcacgaagaacatgggttagtacacaaaagcgtaatggacaatgtttaccataccatgggatcacttgatccctctcggtacatcttgtatgctttgtgtgttgatcatcttgatttactcaaaggaatggctttttgcgcttcacgaaacattgagcaaggaagaatttgtgcgggtagttgtgatgatgtgggcaatatggagtgcaagacgaaaagcgatacacgaggatatataccaatctccactaggagtgaatgatttcgtcacaagttacttatctgaacttcaggtactgcatgctgtgtcagccacacaggagactgtcagtgcccctaggccagctcaatggcagccacgagtacagaacagcacaaagctgaatgtgaacgcggcagtctcgatgagaagagggtatggagcaatgggggcgatatgcagatatgccgctcgagtgtttctgggagtttctgtcctagtctttcggtacattacagatccatagattctggaggtgttggcactgcgggaggcgcttgccctctcagatgacttatatctacgacgtattcaggtggcatcggattgcaagatggtggtacaagacatccagaaggaaaatgcgtcaagctacggagcaatcatccatgaaatcttagaccattcttcaacttttgatgtttgtaattttgaaacatgcattctctcttgcggccggcgccatgtctggctcggtcatcgtgaagatcttcaattcatccatgtaaacattgcgacgatttaataaaggtttggcgagattgtctaaaaaaagatggagtaagaaaatgatcctccaaagtcaaaaaaaaaaaatcctccggaaatcacgcacgaagagaccaggagatctatcacgccacaaatcacgcacatttagttagctgacacatgggaccataccgggtggaggacccacatggcagtaggtctgtgccggcacttgagcggtgggatcagttaacaggccctctgctcccggcgtttatttgtacaacgtttggagagagggagagagggagagaaggagtccgtcagtcagagacacaggtccagccgtggagtagatccagggccggtcctgaagttttgggggcccagggcgaagctaaaactcggggcccttaagtacaattgtcatagccataataattaattatatttgaaatgtaataataaacgcttgtaatccggatggcagtagttttgcaaatatatatttgatggcctacgaaggaatctatcacaaaacatccttgaaaatgcaaaactatgtttagtgtgagactatactataagtatgaaggaatctatcagaagacatccttaagacaagtgactatatcaaatttgttcatgaattatcctaaaagaaatttgtatctaaaatgcagagtagttcaaggactcaatatattgctaaggttattattctaaataaaagtatccaagaaattaagatagatagcaaatccatgtgaattataaggacaaatattatttcattgtttaaaaaataaatcaatgatactgcgatactacaaaataatatttcttatctatttgagaaaatttgcaaattagtaagagcaaattaccccattgatgcatgcctggagtgcacgtttcgtctaaaaactacttgccaagaccaagaccaccatcacgaacattactccttgtttttataaatttcagatctataccacaggattactattatcagacagcataaataaacagttgctgatacgtacagaacatgcggcagcgccggcgccgtcaggctccgatgtgcagccatatcttttgcagccagggcttcatgactcctccagcaagctcatctggggctatgtgggcttgagacgaactggcggcgcttgtcaggggcatgatgcgctctcatagattatggtagatgcgtgcatttagatatgctttaggctccagctacgtggcttctacttgggtcaggcccaattatagttttctttagtgctaggccttaatgtagaaatatttatacttgggctttctctctactaatgatcggaagaaaaagaaagaaacctgtcgctgcatgcctgcgtgcagtttccttagcagtgtactagtgcgtcctgggaggggcccctggaatttgggggcctggggcggccgccccccctgcccctccccagggccggccctgagtagatctcgcggcgagggctccgccggccctcagctgagctcgtcccggggctggtgcgtcctgccggccaccggcgacctcctagtcgttgagtacgtgcaggttcagcaagctcggagtggcgcctgcaggagccaaaggctggatctcgcagaacatgaggtacgcttcgtttcttcctgatctcgaatctggatcccattaaattggtttcttggagtgaactaatgggggtgtgcatcttcagtgcaaattggtggtcatacaccatagatcttcctccgttggttgtaggtcgtttaatctagtttttccaagtatcggccggcctgtgtgcgcatcttaatcctttagtacaaattgttggttatccatgttagatttactcctagggtgcgctttagtgagaccatttgttgccagataactagcacacgcttcactactgacctctctttgtgaataaacatatatcagatgcatcttgatttgtctgtgtgggatgaaaataacaactgtttgcgagcctaaaacagaagaaatgaagagaatattattatttagctattaccaccttgactgcaaatcgtgtgtgattcaccctagatttacattgcttgccaaaaggtgttttttttcaagggcccgctcttctttttttgccttgataactagctcattattcattgttatcttctctttatgaataaatagtatactcatgttgacttgcctgccaactgatctgtttcaaaatcttcacacgcataggtactcgggcagttgggcgtaggatgggaatcacaattgttctggaggaaatgaagaatatcttgttgtttggctgttaccgtccatgttctcttagattgaacattgcaatgagctgttctctacgcaccgaatatattagatcaagcatcatgtcatggacaccataagacttttctgcctcgatagtcatggctactggttgaattatgcctatgtttatgagctcattgaattaactctcctagctcaaatgggtcaatttcaccttcaaatgatacataaatcttcagctatccatcttcatatgaactggtcttgcttaattttgtaatcttcaggatatatgcttacatgtaataaataatgtgaaggtagatcatagatcgacaacataatctgtagtcttaaacacattgtgctagactagagatagaacagaataggaaccacacacataccaatgatatggaaagtagcaaagaaatagtaaaagaagatcttgacttttagattatatcaaagtgataatctggagtcaagcttattttactactagttttgatctaccttgtcatctataggattagttattatatctaagtatgtttttagaagattataagattaagcaaggttacatgatatgtaaatggatagccggatgttttgtttatcatggaaaacaagagattagcctatttgagctcagtgatagagttactcaatgagatcataaatagaagcatgattcatccaatagacatcaatttgatgaaggcatggaaaaatctatcgtgttcatgatatggtgattgatcccatatgttcttgccaagtgaagaataccacttacatggcaccgagcgaaagccgtctatatgaacttacaaaggcaatgtttgaagattatccctccgaaagagcatgtcagataagaccaccatcagaagcagcaatgccacaagtgaggtaacttgcagtatctatatctgctattgttgatctagtgctgcttgtgtcgagtacctgtgttggatttagaataatgtggtgtatgtttcttgtcatttgagactgttgaaaattggagaacactacatttctcttggcgttttgattcgtgtttcctctacaaggtcattgtacccacatacctctgaattctgcaagtttctgcagcgcctattgcatttttatcataatgaccttccttttttcatttatttatgttgtaaggagaagtatgtaatatgatgtactgctatcttgttaattcgcctttggccttttgaatcttcttcgacatgaagtactcattgtgattgtacccacttatgcctgaattatattatcacttctgctgattcaagaaacatgaagtttcagcaatgcctcctgtattatcacttgtgccgattcatgaacttccttttccatttatctgttttgtaaagcagaatatgtgatcttccttttccatttattcattttgtaaggtagattatgtaattatgattcattgttgccttgtttgccagctttgattatccattgcctctctttcttcctagcagttttcacggtcgttttactccagacttgtggaatgaaaatatgattgttcagtaaaaaaaatatcatattcaacaataggaacacaataggaaccacacacataccaacgatatggaaagtagcaaagaaatagtaaaagaagatcttgacttttagattatgtcaaagtgataatctggagtcaagcttattttactactagttttgatctaccttgtcatctataggattagttattatatctaagcatgcatgtgtttagaagattagaagattaaggaagttcacttgatatgtaaatgaatagctcaatgttttgtttatcatgaaaaacaagagattagcctatttgtgaccagtgatagagttactcaatgagatcataaaagtaatcacgatgaaaccaatagatatccattttgatgaaggcatggaaaaatcttatcgtatacatgatatgatgattgatcccatatatttttgccaagtgaagaaaaccacttgcatggcactgagtaaaagcgatctatccaaaggcaagatttcaagattatccatccgaaagagcacggcatatgtgaccaccattaacagcagcaaggtgacagctgtgctctcttgtaatattcatgtgctattgtcgagttggtaaagcttatgctgagtgttaatgttctacatgtgttagattacgaatattgtgctccattcctccattcttgccgattgagatggcgagactagagtcaagaacactccatttggcatggtgttttgatttgtcttctgcaacaacatgaagctctcattgtagttgtacccacttatgcctgaatgctcttatcgctttgctctgatttatataggaggacagcctccactaaaccctagataaacttgggctaagctcctaaaccctagataacttgggctaagcccctaattcggcctattgggcctcttccgtgtatactatagccctaccataacatctctccccgccttctcaaacagctcgtcctcgagctgaacatctggaaactgctggcggaaatcgtcgagcttctcccaagtcgcttcctcctctggcaggctggcccactgtaccaagacatgccagacgccgcggcgctgttgcgcctacagcaccttcgccacctgcgcgggagctggaaggaggcggccatccgaagtaggaggaagggccggcgtcgctgcaggagggtccccgcggtaggccttcagtaagccgacatggaagacgtcgtggaggcgagaaccgtctgggagctccaggcggtatgcgagtgtgccgacatgctccagcacacgaaagggaccggcgtagcgaggtcccaatttgcgcttggagcgcgggtccagagactgtgtggtcctgtggaggaggcgcagccacacccaatcgcctacggcgaactccgcctcgcgatgatgagcatcgtagtacttccgggccagctgctgtgcttggagaagacgctggcgcgcctcagccagaatgtcgtcacgggtgcggagtaagtcgcccgccgtctcggaccgagccgtcccaggctcgtaagggagcatcatcggaggtgggcgcccgtggaccacctcgaaaggcgtggtgcgcagggcggagtgataggaggtgttgtagcagtactccgcccacgccaaccagtccacccaagctcgtggacgatcactagtaacacagcgcaggtacatggcgatcactttgttgaccacctcggattggccatccgtttgagggtggaacgccgtgctcatgcggagcttcatgcccgctagccgaaagagatcctgccagacatgtcccgtgaacacgggatcacgatcgctgacgatggacgaaggaaacccgtggaggcggacgatgccgtcgaagaaggcccgcgcgacagaggcggctgtatatggatgacccagggcgatgaagtgcgcgtacttggagaagcggtcaaccaccgtgaggatgacggacttgccgcccaccttgggaaggccctcgatgaagtccatggaaatatccgcccacacctgggagggtacgtccagcggctgcagtagacccgcgggtcttagtgtctccgtcttgttccgctggcacgtcacgcacgaccgtacccagtcgcggaccatcgcgccatcaccggggatgtaaaaatcagcacggagacgatggagagtcttctgcacaccctcgtgcccggcagagtgcgccaaggtcaggacctgctggcgcaggtcgccatggtcgggcacgaagatgcggcggccatggaggagcagcccctcgtccaggcgccagggcgctgccagctcgccggcgtcaaggcgctggcgcaggccctgcgcgtccgcggccatcaaagttgcccggcgaatgtcgtcgatgaaggcgaaagatggccccgaagatgatgcacatgatagtgccagacgtggcgacgtcgtccgcgacatcctcagtgtcgcggcgggacaaggcgtcggcgaccgtgttgagacggccggggcggtactcgacgatgaagtcgaagccgaagagcttgctgatccactggtgctgcggaacggtggagaggcgctggtccagcaagaacttgaggctgtagtggtccgtgcgcacacggaacgaccggccccaaagatagggccgccagtggcgcaccgcctgaaccagcccaataagctcgcgctcgtaggccgcgagcttgtgatggcgagcggcgaaggggcggctgaagaaggcgagcggtccctcgccctggtggaggacggctccaaagccgatgccaaaggcgtcgcagtccaccacgaacggcatatcgaagtccggcatctggaggacgggtcccgtcgtgagcgcccgctggagagcctcgaatgccgtagtcgcctcctcgtcccaagagaaggcgtcgcgtcgaaggagacgcgtcaatggtgcggcgacgaggccgaagtcccggatgtacttccggtagtagccggcgaggccaaagaaaccgcggagagcccgcggtgacagcggggtcggccacgcggcgacggcggcgaccttgtccgcgtccatcgctaccccgtccaccgagatgacgtgtcccaggtatgcgatggaggtcgtgccgaacgagcacttcgagcgcttgaggtgaagacgatgcgctcgaagctcgttgaagatgatggccacgtgctgtaggtgctccgcccaagatgcactgtagataagaatgtcatcaaagaaaacaagcacaaagcggcacaagtatgggctgagcacgtcgttcatcagggcctggaaggtcgcaggcgcgttggagaggccgaacggcatcaccaggaactcgaagtggccatggtgagtgcggaacgtcgtcttcttgatgtcgtcagggtgcatgcgcacctgatggtagcccgagcgcaggtcgagcttgttgaagaagcgtgcttcgtgtagctcgtccaagagctcatccacgacggggatggggaatttgcccttggacgtcagggcgttgagggcgcggtagtcgatgcagaagcgccatgtgccgtcgggcttgcgcacaaggagcaccggggcggagaacggcgaggtcgaaatccggatgatgccctgcgcgagcatgaccgccacctgacgttcgagctcgtctttctgcagctgagggtaccagtacgggcgcacggcgacaggcgccgtgtccggcagtaggtggatgcggtggtcacagggccgcgcgggagggaggccctgtggctcgtccaagatgtcgctgtgctgctgcaggaggtcggccaggaggggatgcgcctcgtccagtgcagccgccatcaactggagctgcggagtcgcggcgccggagccgccgatgcccgtccactgaacgcgatggccgccctcgcgccagaagatgagggacagcacatcgaggtcccaaaggatggggccgagagtggacaggaagtcgatgccgaggatgaagtcgtagcagcccaggtcgatgccgacgcagtcgatgaagaacggctcgtcgccgatgaggacgggaacctgccgcgccacgccctggcaagcaaggcggtccccgttggcgacggtgacgctgaactgctccgagcccgccggttggagtttgaggcggcgcatggcgtccccggacaggaagttgtgcgtcgagcccgtgtccacgagcgggtgagtcgctccccgttgatcgtcaccggaagcagcatcgtctttgccgtcttgatgctagccatggcatgaagggagacgacgaaagcggtcgcatcgaccggcccgtaggtcgtgacgccggcctcggagagtgtggtggtgtcgagctccgcggtgagggcctccacctccgcgtcgtcgacagtctccaagtagaacaagcgggtgcacgtatgacccggcgcatacggctcgtcgtagttgaagcacaggcccttgcggcgccgctcgagccgctcggccgacgtcaaactacgaaaggcgcgtgtcggcgcaggggcagctgcaggagtggccggtagggcggggcatgtcggggtggcggccgccggggcggggcgggttgggggacgcgtgccgcggcccaggaacgcctgctgcagggcgttggcgcgctgctcgtatgcgcgcgcgtagtacatggccgtctgtaggtcctggggtcgcgcatctcgacgtcgacgcggatgtggtcgggaaggcccccgacgaagagctcgacgcattggcgagccgtgacgccaggcgcatgacaggccaatgcctggaagcggtcggcgaagtcctgcaccgaagtggtgaagggaaggcgaccgagttcggccaggcggctcccacgaatgggggggccgaaccgaaggagacacaggtcgcgaaagcgctcccatggaggcatcccaccctcgtcctgctcgaggccgtagtaccacgtctgtgcggcgccacggaggtggtaggaggcgatccacatgcggtcggacgccatggtccgctgcccccctgaaaaactggtcgcactggttgggccagtttagggggtcgacggtgccgtcgtaggtggcgaactctagcttggtgaagcgggacggctgctgtacgtgcggcgaggctgcgtaggcgccctcatggcgaccttgcgcggcggaaggagagggctgcggcaccacagagctcccggcgtacgggtcagggtacccgtcgagccccccgaaagtggtggcgggcgactgcaacaccgtcggctgtagcggcgccgtcgtgtaggtcggcgtgtcgatccacgtgggcagtggggacggcgacgacggccacctgacctgggtgatcggtaggccctggggtgcgacggtggtcgggggcggtggcgcgaagggcgccgccattggaggcggtggtggcgggatcacgtacggagcctggagaaaggtccggaggttcgagaccaccagggtgaggtcgcggatcgccgaggacatcttcaccggggagaggacgggggcggcttcggccgccagggtcgcagtaccggaggcggccggccctgaggtggccggcggtggcggtaggtgcggcggcggcgactgctgcgaggtggcggggaaggcggtggtggcgtcggcggtggcggcggcggtggtggtggaaggacccgaaaaactcatcgaacccaagctagctgataccaaattggtagaggctagggttctaccaggcctcgggcgtaggttgtaggggtggaagggaggacggcgaggcggggaacgcacgcgccggcggctgggcaccgtcgctgcgagagagagagagagagatcggcggctagggcagggcggctagggttttgggctcccgtctcctgagggaggcgacaacagaaaactgtttattgtctgtttaatatcgaaggggtacatgtgtttatataggaggacagcctccactaaaccctagataacttgggctaagcccctaaaccctagataacttgggctaagcccctaattcggcccactattgggcctcttccgtgtatactatagccctaccataacagaagtatacttccatatttccatagtttgctcagtctttcagctgtatgaagtctactttcttaattccatagtctgctcagtcaccgcagccaagatcaagtgagatgatgatgctgatccttctcagtgcctgtttgatttcctcgctgtctcgacagtaagtgaacctgaaagtgtgatgcccctatcttggtgcaaaactcagtcaatcctcttgagatacctctgccgtcactggatagctagtcagcaggccattgaacgtacgggatgcgcagtcctggcgggtctccagtcccttgcgcggtgcgctgatggcaaagctggatgcttgcaatgcctatcaatcctggctctaatcgtggttgtcctctgcctagcttattctagagtcgcagtcaattttttaaagcctaataatcaagtcttaattaataaacttctaaaaatttaaatttgattggacttctagaataaactggaaagaactgtccttgtggctgtccccgtggtcaggtccttgcatgctgacgctgtcttggaaagattaggtcaagcattcctctgtacttccccgccctggccttaatttgctcactcatcagtccatcagagatttctggaatggatctcgtcgcctcaaaccattcttggaatgagttagagggtatatacgtggtgccgaatatgaataatcttgtatgtctttctgtctctaggcaatgcaaatgacagagaagtttatttgtaactaagctgatgcatctgctcagaggcatctctaggtaatgcaaccgagcagtttataacttaaactagtgcacttgctcagaggcatcttcgcaggcacgtaccatttcataagtgccaaagaagctggtggcgtttaattaaacacaaacactgcatgggtgaagtaattaactagtgctctgcacagatgcacatatctcactatttttctattttcctatggcacgccaacaggtacataaagtccgcgcgtggagattggtgacgcggtgtaatttaactctatcactgcagtcgaagcggcatccgaggcccgttccaagatcccatctgagtatcctctaacacatacgtgtacagtgtactgtgtaaactcgtagtatcatctagcttctcacctaggacatccgaacaaacattgcctggaggttcttcctatactaaccacatcgcaatactagctctcttccaccaaagcaatatcacaggcgcgtgtagtgagatcgagctatggagattcccatgggggctatcggcgctctcctcccaaagcttgctggtcagtgagttcaccttggagaaacgcgtgaggaaaggcattgagtctctcgtgacagagctcacgctgatgcacgccgccctccgcaaggtggcgaaagtgccgccagatcagcttgaagagggggtcaagatttgggcagaaaatgtaaaggagttatcataccaaatggaggacattgttgataccttcatggtgcatgtggagggtggtggtgtgcctgccaacccgaagaatagggtcaagaagttacttaagaagaccgtcaaattattcaagaagggcaaagatctccatagcatttccggtgccttggaagaagtgcttggccaagcgaagcagctggctgagcaacgtcaaaggtacgaacttgcacatgacaccggtgttggtgctagcattgaccctcgcatgatggctctttacaaggatgtgacagagcttgttggtattgaagatacgtgagatgagttgatcaataagttgattgtgggtgatgattggttaaaccatccactgaagacggtctctattgttggatttggcggattaggcaaaacaactcttgccaaagcagtgtatgacaaggtcaaagtgaaatttgattgtggtgcttttgtttaagtttctcaaagtcccgatgtaaagaaagttttaaaaaatattctctacgaacttggcaagaacaagtacgcacacatccgtgatgaagaatgggacgagaaacatctcattgacgaactcattgagttccttaatggaaagaggtatgcttcttttccatcgatgatcatttttttagtaaaatcaggaaactttagccttaaagtacatgcattctgatagcatattgttgatacacgacatatagttgtatagtgtttatataagttcgtcaagttttctttggtgaaattttccatggatgtttgttcactattttaaatagcacgctatagagtcgctatgacaccagtatacccgccagactggagttgcgctatgctgctgtatatttcaggtcgaaaggttacttgtgctgattgtgatgcgaaaggcaatttagtgctaaatctggctgtcatttagcgctacactatttcttccaccgtgttggttcaattttttagggtccaaaaatcgatatcctgcatgcatctttgcattatgatttgctcttgtagtgtaatgatctgcaccatgtcctttttctgtactgttatgaagtacactatgtcattcatctatttatttggctctatgcttgttgatatatgtcaattgtcaagtatatgttaaattgatgcttgattgtattttttattgatcctaaaacgctaaatcaagcttagcaagctacaactacgatatagcattccatagctttttgtcgagccgtcgctaagagttttaacgtgctatttaaagcattgatgttgtttaataatagtctccttacaacatgtatatatctttcttgattgattttttaactatcaaaaacatttatgtaggtacctcgtcgtagttgatgacatctgggataagaatgtgtggggaataatcaagtgtgctttctcccagaaaagtatgggaagtcgactaatcacaacaactcgtattatcagtgtttctgaagcatgttgttcttctagtggtgatatttacagaatgcgagctctttctgatgatgtatcaagaagagtcttctataaaagagtattttctgagcaacaagggtgtcctcatgaatatgttgaagtatctgaagatatcttgaagaaatgtggagggataccattagccattattaccatagcaagtctccttgctagtaattctcaaataaaaacaaaggaacaatggtatcgcttgctcgattccattggtcgtggacttacagaagatcgtagtgtggaggagatgaagaagatacttttgtttagctattatgatctaccttttcatctgaagccatgtttgttgtatctaagtatctttccagaagatcacaagattatgagagacgagcttatctggaggtggatagcagaaggctttgtttacagtgcaaatcaagaaactagtctatatgagcttggtgattgttattttaatgagcttataaatagaaatatgatccagccattggacatggatgaggaagaaagggcaaaagcttgtcgtgtgcatgacatggttcttgatatcatttgttccttggcaagtgaagaaaactttgtcactataatggatggtactaagagaaaagtgcctaactggcaaagaaagattcgcagattatccatccagaagacaaatgtagatgttgctaccaccaatatggcacaagtgagatctgttactgtttttggaaattattttgaacaccaaatgccactattttcaagttcacgagttctgcgtgtattggctctagaagactgtaatgtttcagatatcggctctgtgggcagtttggtacacttgaggtacctgagactaggaggtcagcatattcaaaagttcccagcggatataggaaagctgcattttctgcaaacactggacttcagaataattttcaataaaattgttttaccgtcaagcattgtttggttgagaaatctgaagtgcctatatatcactgggcatatagaattgccttctgggatggataatttgacatccctagaagtgctcgagggaatgcaggtgggatacatagaatctgagaattataacataaccattgtgaaagagttgtgccatctgacaaagttgagggtgcttgtgtttatttggagctgtatgcatgaaagcatgaaaaaagctttaatggaatccctgagtaatttgcataaattggaaagtctatgtattagagcccatcatgaatacctcgatctaatggaggaaggcagggtgccccctccacagctccgtagattatcttttcagggaagtgttggctcgaccgtgactgcgtgacactaccggcatggattaatccttcattgctttatcatctctcctgcctagcgatagaagtgggggaggtgcgacaggaggatattcggcttcttgggatgctgcccgccctttgttatctctgctttgcgagaagttatgctaagagctcatcacatcagggtgtggtggagatgttggtagttactgccgatgccttctcagttgcgagttgcgacggagttatctttctataatatacctgtgatgccgtcgacatttccgagaggagctgcgccaaggctgaagcaccttagttccggcttcccagctaggtggatcacacgtggagacattgatttgggcatggggcacctcccttcccttgagaaagtcgaattccagctttggtatgagatgaaatcctgcgatctggagatgaatgaagcagaggttgcaccgagggctgcatcctgcgatctggaggtgaatgaagcaaaggttgcactgaggtctgcagcgagttaccatcccaaccgccccgacattcatctcagcgcacacccaaaatggtaatgttgacacatctaacgacgacctcatgcagagcgcacttattctcatctatttgccatgccaagtgcttattcccctctctttctttctctgtttcagagtgtagaacaggcaaggccgcatgcgctgaggtccccttcgtttctactccaagtgttcagtagtttgttctccagcaagtgtttagaattcatcttctttccttttaccaatttcagatggagagcacaaaaatgctgcataaaggtactactattcttccagcatttcctttatcctgttttgtacttttgttaagctagctacttcattcggttcccctgaagcctaagggctaaggttacagtctatcttaagtgccaagcaaattgccatgtgaattaggctttgatcatttacgtattacgtcttacgccatataagcacatcgtatgaattgttgttacttctgcttaccacaagattacatataacgtggtccagattagcaagcaatccactagcagtactttttccattttctgtacttggattaacactgtttattcctataacatccagctgagcaatacttccacatggctttgcaggtagccggacaactaataaatttcgttgacatggactcgattgtgccgtcgtgattctccgagtctcgtcctgtcagctacgactaaattttattcgatgttgtcaacgttcagtttgtgagatcttctgaattttgttgaccttctttttgtatctcttgctcacttgatttctcgttctccttgcatttgacatgctggtccaagttccatcaaacaaacaggggaggccatagctgtttctgtttgtatcatcatctttcctttcttgggagtagctactgcatgaatctcaattcccaactgtataatgtattggacccccaacgttatatgaacttctaaacgagccgctgagctgcgtattcttcagttgagagatgcaaaggcttcagacatcctcacctggcagatgggaaagtgaaaagcgtagattaagcggatgcctcgagcagggacgcgttcacgttaatataggcgggcacaagcgccatagattacaaggttggttaggcttacgattgatctccaagtaacctaaggatcttatctctaagcctaacagattacaagagttagatacggtttatatacaatactgtatcgtaactatatataacgtttaacactccccctcaatcacaacttatcacaactatctaagttgagattgcgtcaaaatccttttagctgcctaagagtgagcggtttagggaagccatcagcaacttcacctgtaggtacaaacctaatattcaacaacttatctgtcacacgttctcgaacaaagtgataatcaatctcaatgtgctttgttctggcatgaaagattggattagcagacaaatatgtagcatcaaggttatcaaccaaagtgatgctgctctgggatgtcgtatccctagttcagtcaacatgttctgaacccaaataatctcagcagtagcattggctagggccttgtggtctgcttttgtgcttgatctaaacacagtaggttgtttgcgagcattccatgatactaaattgcctcctaaaaacactgcaaaacctcctgtggatcttctgtcatctgggcatcctgctcaatctgcatctgagaaggcactcacaagcattgaaactgacctactaatcttgagtccatgactccttgatccttgtagatacctaagtatcctttttactgatgtccaatgtgtactggtaggagcatgcaaaaactgacataccttattcactgagtaggaaatatctggtcgagtcaatgttaaatactgcaatgctcctacaatgctcctatatctggtggagtcttctgctccaagggcctccccatcatgaagagataatttgtcagatgttgacaggggtgtaaaagagggtttgcatcctttcatacctattctctgaagtatttcttgcacatatttttcttgtgacagcatgatcccattgggtacctttttaacttcaatgccaaggaagaaatgaaggttacctagatccttgagagcaaagtccttgcttaagtccttaaggagagcctcaactgcttgagtggatgagctggtgacaactatatcatcaacataaatgagcataaaaatagttattccatgcttgtgataaaagaagagtgatgtatcccctttggatggaacaaaccctagagattgtaacttaaaagacaaacgagagtaccaagctctaggtgcttgtttaagcccatacaatggcttatctagtttgcatacataacgtggtgagtgggaactctcatacccgggaggttgcctcatgaacacttcctcttccagaatgccttgcaagaacgcattcttcacatctagctgccgcatgcaccagttacgagatactgcaactgagaggatcaatctgatagtagcagccttaacaacagggctaaaggtgtcctcataatccaatccataccgttgcttaaagcccttagcaatgagacgtgctttatacctgtcaatagtaccatcagatttcctttttactttatagacccacttccagtcaataatatttctgcctctggcaggaggaacaagacgccacgtcttattttttatgagggcagaatattcctcatccattgctgctttccatctggggtcaccaagaccttcaccaaggttttgtggttcacctgtagagcaaaacgagtcccaacgtatacaaccttcagtgaaaactttcggtttgacaataccaccttgcgcacgtgtatcaggttgaacaggtggaggcgaggcaggacgatcaagctgccgttggaggcgatttgtcggggcagacacgggtgtggacgtagcagaggcaggggaggcaggatccaatgcagattcgctgggtgattctggtacccaatcatcgccgaactccgcatgcagcagctcacctgcatgtgcacctgacgaggaaaccgacgcgccttttgatgagaccgcccttcctggcccaccagctgtgtcgcctggttccgcaggggacgaccgaccccgaccgaggccacatgcaggcgaatcagtgttggcccgtgcctcgagacccgacacgggaaccgcccgcacgcggcgcgaaccgcctggtggcgtgtcagagcgagccagcgggcccgtaggagatccaccgtcaacatcagcgccaagagtagcagcgctcgatgcagcgccagatcccgagacgtctggacaggatctgggcctgactccgacgcaggatcttctatggatgcacctgagtctgtggcagacataaaatcatgccgatttgcaccagtttctgcattattttccttcacactatcactgagaggtcatcaaggatagtattattagacatggtgatgcggtcattagcagtatctacccctcaagacaggaattgtggtgatgggagaagatgggagggtaataagatgagctctttgcggagttgagcaccggcattagggtgaagtgttgcaaaaggaacaacttgctcatcaaacacgacatcacgtgaaatatagacgcgaccagaggcaatatcaatgcatttataacctttgtgcatagtgctatatcctaagaaaacacactgctttgatcggaactcaagcttgtgtttgttgagggggcgcaggttgggtcaaacagcacacccgaaaatatgtaggaaggtgtagttgggtttggtgtgaaagagacgctcaagaggagtttggttgttgatgactctgctagggacacggttaatgaggtatactgcagtgagaaaggcctcatcccagaacttaagtggcataaatgcatgtgcaaggagggataaaccaacttctacaatgtgtcggtgtttccttttaggagacccgttttgctgatgagcatggggacaggagacgtggtcagtgatgccaatgcgctcaaagaacacattaagtttttgatatgcacctccccagtacgtttgcattgccagaattttgcgatcaaacaaacgttcaacatgttgttgaaagagatggaattttgcaaacacatcagatttatgcttaagcaaatagatccaactaaacttgctgaaatcatcaatgaaactaacatagtatttttgctttcctaaagaaaggggtccaggcccccacacatcgaaaaaaaacaagctctaaagggacctttgactcactagtggaacgtgagtagggaagttgatggctcttagccatttgacatgaatcacaaactaacaggtgatcctttttattggacactcgaaggcaaaaatcacgaagaattttctggaccaccggtaatgctggatgacataggcgcttatgccaccttgaggtagatggtttgaccacaccaagtgcttgacgttggggagcatcatggcaaccagaaactggaaacaaacgatccttactcttgctttgaagaatggttctccgagtttcccgatccttaacaaaaacaatttcagggtaaacctcaagaaaagcatgattatctttgataagttgataagcagagagtagacttttgtcagcttgaggagcatgaaggatgtttttgagatctaaggagccatggggagtggataaaatagagtgaccaacatgagcagtgtccataccttgaccacttgtagtgtggatttattctgtgtcggtgtagcgatcacgaacaaccaacttctctagctcaccggtgacatggtcagttgcaccagtgtcaagataccaattggtatcgactccataagagtgggcagtgttggcagatcggttgccacctccaccactggcagggttgcggacattgttgttgttgtagccatggtcgtagcgcttcctgcagcgccacacaccatgcccactctccttccatatctggcagttctcgcggttgttgttgttgcggtcaccgcgatcaccaccgcgatcaccacgcccgccaccggagccaccaccaccgtgtgagttgtcggagaagcgagcacccatggggttgttggtgtagccacgggagccattgtcgccgccgttgccattcctagaacggccgtaggtgccccggccaccacccttggcagccagattggcagcgtaggcagaggcctgggcattgatccggccttctgccgagaggagtagggagtataactccccgatattgatcagttgatcagtgatggtgcttgtggagatcgcagaaacgaacccgttgtactcggattcatgcatcagtccctgaaggatgtgtgacacaacatcatccttgtcgagtggtttgccggcagctgcgagttcatcagcaaggcccttcatcttggtgaagtaggcagcggcagaaagatctcctttcctggtgttagcgatctgtgagcggagctggatgacacgtgctcttgattgcgacgcgaagctctggagtatctccttccatgcttcagcagcggttttcatagttgctaacctgcatcaggacgtcccgggagagggatgcagcaggaaggtgagtacctgctggtcttgcttaacccagacggcatgctcggggttggggtgatgacagtttccttcttgccggcgatctctttctccaagatgatctcagcaacgggttccttgtgtcatccatcgagatacgctagcacacctgcggcagtacctgggctctcacacaaggaagttctccctcgacagcttctctgtgatggtgtgaccaagggaagcaatggagggggtggccatggcgacagcagaagataaggagtacatggcggctggctagatgcgatggaagagctaggctctgtataccatgtgaaaagcgtagattaagcatatgcctcgagcagggacgcgttcacgttaatataggcgggcacaaacgccagagattacaaggttggttacaaggttggttaggcttaggattgctctccaagtaacctaaggatcttatctctaagcctaacagattacaagagttagatacggtttatatacaataccgtatcataactatatacaacgtttaacagggaaatcaggagaatgaaggggtgggcgacggcaggcatcgtcgcgcttggcggacagcggtacgggaggtcgcccccagcatctccaccacctccggacggggccgcgagtttcctcacccggctccacatctattccttaggctgcggagccgaccaaggggtggtcgaatcgggggaggcggtggccggctaagggaggaaggtgggctgactggggtcgccgccggctgccgcctatgctccgttccaccagggcagctgtgcttgggattcacacagtgggatgacagagagaagatgttcaggtatacctggtagagtacccgttaaaccgtgtcctttgaaaatagtataccaaaaaaggctttcgcatgttttatatatgaacgtcgctacttagcggcgctgcaccagaggcttcctcccgtgcggcgctcgctaatagctccgctaatgccgcgcatcgctggctaattctccttccacctcgcataatgggctgcatgttggactaatcaagctagagcacatcgagcatcttgtccgatggcccaccacacttgtatatcttctctagcctaaaaaaatttgtatatcttttcagactaattctaaacatgaaaaacgtgatacttgatatgttaacttgcccgtggtgttacgtagaggaaaagtaaaaactggttagtggttaaattgatggttttgtcatgcttgtcagtttaattggtttcaataattaagttattttatacaacttgttgtttttgtttacacatagttgtcaaggtttctccggttgccagtttaattgttcccggttgtcaacttattttataaagcttgcaattttttgtttgcatgtagttacagtgatggtttgctatacttaccagtttaattgttcccagttgccaatttattttatacatcttgtcatttttgtttacacgtagttatattaatgtttgcctatgcttaccactttaattgttcttagttgtcatgatattttatacaacttactatttttattcagatgcaattgccaaaatggtttgatgtgcttgccagtttaattgtttccggttgccatgttgtattgttgacatgcaattgatgtcgtgtttgccagtttcattacgccaagtgccattatgcgcataactttgtaatggtttgttatgtttgcatacctagttgccagtttaattataccaaattttcaaatttattttgtacaaacatgcaattgtttgaaagaactgtagttctttttcctgaagattaacgagttgttggtcttatatctcagttaatatatattttcatgttatcgtgtattgttgaaaaagcagcaaagttctaaaaaataactacaaacgatgaacactagtagtaattttctcgtttgttagcattcgcgcactcacggctattgtagtatatccatttctagcgaggtgctgtagcgaattgaaaaagcaagctgtttttttttctacgttcatctttgttaggggattttctacatgcagttttttttagaggctcctacgtgcagtttggtaggccggttgtgcctatgggccatgtaagaaaagtaaatcgttcgtggttgggtcggtgaggcagcgcgatcgagggcgcaggattcgcagctaccgccgcacgggggaccagcgtgcgttcactatccattagattttccctttatatatatatataaagcaatgatcaacaacaatccgatacaaacgcacgctaacacaacatacgcacacttccaagtgatgatacataggcactggtggcagcaacatcacccctagcactacaaaaactactggagacccagtcgggaacacgctacggcgaagagataaaagcgcgtacgatgaaccatggaattcaagacgacgccttcaggaaggatcactacaagaaatatgctcatacatgacgttttttaagatgtcgttgatgaattcgtcataaatctatgacgattccatccgagatcatcgtaaaccgttttggggatcaaatctacatataaattacgacgatgtgagtcaaaaacgtcgtaactgcataagacgagatcgtcataacttttacgacgattgtaaaaatgtcgtaacatgttctaactatgttgacatggcactcgtgggtccattctatcccaccttatcctagtttctgaagcaacctactattatatcattccaaaaattcttgaaaaattctcataaatactttggatcatatatttctcaaatatgtgaaaacccttccttccatagttcaaaaataattcagcaatattcattttcctattctgaatagcactttgtgaaggaagtgctatttcttttttttattaccctcatattttttggacactctttcctatccaaatcattgcctcatgaaaactttcgtaatgcctagtaacattctttgccattccaagatgcacccctgtttgcaacattgtttgccattccaagatgcacccctgtgcacaatattaaatcatttcaataaaccatggcatgaattttaacataactttggtaatttaacttggaaagtacaaatctttatacataatatctcattttagagaatagtttttaaaaatattttcgtattccaagtttgcgatttttcctcataactaggtcacatgtaatgatataatgtgaaagtttttcatttttttcatttttatactgttttaaaatgcattttaaatgaaacatatctctggccaatcagagtggagaaccatccttcaaacggatcacacgagtgtagctgatctgagccgtcaaagcaaaccagatctaacgtctctcaacatatcgaaatgtaaacacaaaaaagaaaaacaaatgcaaaccctacccagatccacccctcccctcgtctcccacatcgccgcctccccgatctaggcaccaaatgaacccacccacctcgcggccggcccttctcctctctctccctcggctcggagccagccagacaccggcgagcgaccctaccagcggcgtcggcggcggcggctccggttccggcgggcggacatggcggtggcggccccggggcagctaaacctcgacgagttcccctcgtggggctcccgcggcatcgactgcttcgagaagctcgagcagatcggcgacggcacctacgggtccgtaccttcccctaccctactcctccctcccctcccctcccctcttgcccaccagcaattcgcgcgtcgccggatctggagcctgacccccctctctctccccgtcgccgccgtcgccaggcaggtgtacatggccaaggagacggagaccaacgagatcgtcgccctcaagaagatccgcatggacaacgagcgcgagggcgtaagcctcctcctcacaatttttcttcttcttccgtcagatgttgggggtgagtgcgtgcatgtctgatgcttggttccgttgcagttccccatcatggcgattcgcgagatcaagatcctcaagaagctccaccaccagaacgtcatccagctcaaggagatcgtcacctcaccaggtgcttgcgctgggttaacccccaaactccattctctcggacaaacgaaacatggcagtaccacgatccagatccatgcatgacggccgcttactttaccctgtccgtccatacctgataccacaccgtgccccgtcctggtcgatcgccagatcgaacggctatagtcctagctagctctaacttccaaatcttgactggcttaagttaatgtagttttcaaatcttcttttcgttcactatttgttgaggctgtcataattttcttttactcgaagtactgcttggattttctagttatgcatttaccctgattaatgcttaaaactaaagttggtcattggatcttgtttgtttaggcgaatttttaatattggtctatacatactagatataaaaggagggatttatctaataaactgcacatatggtttcacattccacctctgtgctcgcaatttaaatgcagtacattttactcactgatccatcttgaacaatctaaataggaccctgataagtgccgcacgtttggcacgaggcaattctgtcctgacgtttttctatggcaactttctgtatggatggcaagtttcattttttttggatggcaagtttagatgtataaatatcaaggcggtgctacttcgtgccacacgtcaccttccctgctcacaattaagatttagcacttcctactcgtcagtacacattgatcttaggggtccctgtattgtactaccatactaattcttcctacagttctatttctcttacatacacttgagtcttaaatatgcactgaatcagtgttagtgtgtacatgtctgaaaaaaaaggatacggaatgaagaaatacacacatgattttgtacttgacctaccgtgctcacaattaaaatatgcactgaattgtgaaagctcttggaggctctgtcgcaggtgcagacaagagaatattgttcctctgcggggtaatactttgagaaaattctctcctggtcaattcagttaatgttcctccttgtaaacattatttctcatttttcattacacataaacagtgtactgaacctgtttgttctgatgacgttctaaacaggattacatggaggattacaaggtgatggtcccattccaggccctgcaagcccttggctgccatgtcgatgcggttttccctgacaagggtgctggggacaagtgccaaaccgccatccatgactttgagggcgaccagacttacagcgagaagcctggtcacgatttcgctttgaacgcgtcatttgacggcgtggatgcctcaagctacgatgcgcttgtgattcccggtggacgtgcccccgagtaccacgccctgaatgagaagatccttagcctggccaagtggttcatggacaaaggaaagccggtcgcgtcgatctgccacgggcagcagatcctgcctgctgctggggttcttcaggtacgtgataactgatatccattaactggcttcccctgctctgcatcagttctacccttccggcttatatccggttccgctctgaacaaaacaaagccaaactgcatgtctgttgcgacacctttatatatatcattatcagcggtgtaaaatgttgttctcctacttcgtgtgcaatgatgtgtatatggcacatttatagtttctcatttgcaagtatatttatggatcgttgtttattagtcaaggttctacatggtgctagtttcctgatccgcacactgattattgtgatgatgatcatggtatttattgcggatcagttgctggttctgtctacttttttccatgggtgtcgatatcaagattttgatgtactcacatctgtctttagttttgcattatgtgatcgtgaatcatttaaagttatcattatgtgatccgcacactgattgtttgagtaattatttcattttaatgagactgaagcctattactagtttctatgctctttaaaatattctaactgataaggataagatgaataaatctcattgatctaaatattgtcctctttaccagttcattttgcttggagctgttccattccgtacggatgttccacgcttgcagaagcttggagtacatggtgttgtaaccctgaatgaaccatttgagacgttagtaccatcatcagtatataaggcaagtaatttttttgctggttatacagaatcgatgatgaagttactggctgtgcagaacatcactttttgttagatatttagattttcaatgataaattttcatgcttaatcaggaaacgcatctcatgggaggatgacatatattcactgcaaagctggaaggggacggagaaagtatcgaagaaaactgtagtccacaaaaaagtatgccgtggtttccatggtatttttgctgtcttgctgcaagaatcgaagaaaactgtagtccacaaaaaagtaccatctgttataatgattatttaagtaattacatagtttaattttctgtagcatagggctaaatgtcgaaatactcagcagctcgcttaaaaatatcatatcattgagaaatgccacatatactaaaaggaacacgactggttttcttgcatttaattagacgcacccttaatacctcgtgcaatacatacaatttcctgtaataaaatccaataaggctgatagctactctgtagtgcacacctgtcattttgttttccactttcttgcttgcataatgcattcctacacacaaaataatgctccctccgttccaatataagtgttgcagatttgctaattttttttaaatattgctttttttctattttttttgaaacatattgtacttatttcaaaattttcaaaaatgtcctaacgtcggcgatctgcaggccgactggagtactcggcttcctggaagccgacaggccccctatcggccacgtggcggccgactactggcccggccacgtcgatagggggctgtcggtgcgtgctcctccactcggcgtcctggaggccgacaggctcccattcggccagcaggaggccgaaaggggcctgccacggccacctctcctctctcctcccctctcctctctcctcccttatctcttctcccttccttcttctcccttctcttttctctcttctctcttctctatcttcttcttcctccgtttcttcttcttgccatgctctcatttctctctttctccccacacaaataatcttcaattcttcctacttatccgataaaactacgttttaaaccgtggctttgttgcgtaagttcgagggaagcctaatcatccgtgtcattcgcgttgaggtcgttgttttgaagctattttttgtggtggtggtgtaggttttggacgaggttgcggaggaggttgaagtgctggtgccggtggaggtgtgggtgaagttggtggagttgcagctggtggtgacggttgttcttggtgttcggtgttcgtcgttcgtcgttcatcgttcttcgtttctgcgcacgcttcaagggtaaaattatttttacttctgtgaattagtttagtgaatgtagtagtttcaatatatttagttgtccgatagatgtggaaaaatatttagtgagtttagtacttctccggtagattagtaaaaattaagtttagtgagtgtactagttctcttccggtagattagtaaaaatttagtttagtgagtgtagtagttcccctccggtagattagtaaaaatttaggttagtgagtgtagtagttctcctccggtagattagtacaaattaagtttagtgagtgtggtcctccatgtattcgactcctccaccatggcccacacaggatacacaggatacagattatgatgagggtgggtccgagctaccccctcgtaacattaggccagtgcacaggtttggatggagtacgcctccaacaccaccagagcgtcgagggagacggcgtgattgatgcacagctcttgaccttctatgtatgatatttatgtgtatttcatgagacctatgggtactttatgtatgagacttacgtatgagacttatctatttttatgctcagtttgttcatgaaactgttgaaattcgacgatgacaggaaacaattgacgggaaacaaatacataaaataagatacattaagaaaagatacataaaatacataagataagatacattaagataagatacattaagatgcaaggctcatacaaaacctacataaagtcgtcgtcatcgttcgccgatgcagagctctggcccttcgacgaagctctactcttggccgtcttcgatgctgagctctggcccttcgacgaagctctactcttggccgtcttcgatgctgcactcttgtccttggacgaagctgtactcttggtactcggcatgaagatatcatcttcgtcctcgctatcgtcaatccaataaaaaggaaattctattccacggtgtatgtccttgcctttcttattccatctttcatgcatccgcaaaagttctttccgtacctcctcatatgtccttcgaggccaccccttcctagctaatgcgtgagcgacctcattcagtagcatgtcactactgatgagttcgtcccataaaacttgtctattgtctaacttgaaatcgatagctaggttaagaagacatcgagacataccacggtggaaacttctatcaaaaggataattcgacatcttgaggaatgctaactactggactacactgcctgctatctcaccgaggtatggagggggttttataggtggctgcgagcgaagcgaggcgggaaacaaatggcgggaaacactacgcgggaaagacttcgcggcaaacaaatggcgggaaaatatttgagggaaataatggcggcaaacaattggcgggaaacaaattgctgaatataagatacatggtactggaattaaggttcaacaattcaaggaaacagtaaaataaatctactgagtccagcgtggatattttccttttccatcaccagcttgttctgctgcctgcgccgcacgagccctttctttctttctctccctcacagcatcacgggcctctcgctcctttctgtaatgttccgccaactgaagttcctcttcttggtctttcattctcatctcctcaagaaaagccctctgctccacacggtgcgcttcccactctctcttctcctctgctttctcctctgctgcagccttagcgcgacgctcttccaagtccaaactagcccatgcacgacgacccatttcacgaagctcggccaccgcccagtccggctgctgactgtcgatccaacgatagtacatgcaaagaggaggaggagactgcagcaaaaagtaaaaacataaatatccagctaacaataatatctacaatgtttttgttctcgatgactgagagcataccggaggcctgaggtacgcagaaatagattccggtggatcagtttcataattggcgcacatgaaaaacttcatgccaaaccaaactgaaatatcagtaacctccttcaccttgcagagatcaccgcaccaacaacgaactgctgccacccccccaggcaaactcgcactcttcattttcttaggcctttcgctttgatcggagcaaggcaaactcatgatgactaaagctgtagtattttcaagtctggctggatgatggacgaagttttcaactgcggctggatgatgatgatggaggaacgcgtctccttttatagacaaggatgagagaactgtttcgtcggtggagataccgccgtcagcactgtttcgtccgtgcagttagcgccgtcagcactgtttcgtcggtggagttagcgccgtcggcactgtttcgtcggtgcagttatcgtcttcaccactgtttcgtcggtgccgtttgagccgtcagcactgtttcgtcggtggcgttagagccgtcaatactgtttcgtcggtggcgttagatccgtcaacactgtttcgtcggtgccgttacagtgtcaacactgtttcgtcggtgcctttacagtgtcagcacggtctctggcatttgtaaatgggttcaaaatgggtacatttcatgctcgaatttgggaggaaggtcaaaacagtgcaaaaaaaaccattctccttcttcttctcctccttcttcttcttctccttctccttctcctccttcttcttctccttctccttctccttcttctccttctccttcttctccttcttctccttcttcttcttctccttctccttcttcttctccttcttctccttcttcttctccttctccttctcctcctccttcttcttcttcttcttcttcttcttcttcttcttctccttctccttctcttcctccttcttcttctttttcttcttcttcttcttcttctccttctccttctcttcctcctccttcttctttcccgcccaaatcacctgtcggctcaggggaggccgacagggacctgtcggcttctggatggccgacaggcccccctccctgccgacagcccccctcctgctccctgtcggccaactggtggccgactgccacctctcggccactggaaagccgacaagtggcagtcggccactgggaggccgagattgcaatatttttgaaaattttgaaataagcataatatttttcaaaaagaatagaaaaaaagcaatatttaaaaaaaattagctgcagatttagtactaaactagtacaaatattgtactagatcaacgacatttattttgggacgggggagtactaaacaacatgtagacatgcgttagaagttagtaccaatagttatagttcttataacaaaataaagtgaggtgtggtagtacatgtgagattaaacatctgaagcatcccttcataccgagattcaaatatgttgcagtaattccagtcgctgttcagaagtcattattctaagtgtttttttataactagcagcttttatacaactctgacatcttgtataatggatatattttgtgatttgaagttactgatctgtgctctggtgtaatattacggtctaatgttttttgttttgtctctttctctgttgctaggaaagtggtgggaagatgtcgatgatgcctacttgggacatttaaatcaatacaacataaaaaattatgaacctatgtctcataggagagtggaatgaactccgttgttagcagatgtgtcattgttctattgtgcaattctgtccgttcttgctatatttcttgctatatttctgtgtaagaaaatgtattcatgagatgagttattgtgttatgtatacctgggagatgtattatgtgatgttatatgatggatgatttcaatttgattttgagttttcttgatttgaatatgaaatagtgttggatttaatattggacaaataattgggttgaaaaggtctatcaagtagaaatgaaaccaaaaagttgctgaattcaaaaattaaaaaggccaaaactgaaactggatcaaatgtatttgggcattaaaaggccagggcccaaattagaatgataaaaaacttaaaaaaaaactaaagtggctataaataggctaaggcccaagaagaagcccaataagaaaaagcccaaaaaaataaaaccaacccacgtgatcaattgaaatgggttgggctgatttcaaccatgatgttttgatttcgtcgtaatttcgtcacgtaggactaccacgtaggactgggtttgattgccaatgacgatttaggatcgtcgtaaaggttacgacgatccaggaatcgtcgtaaaatttacgacgattttgatcaaaacatcgctgctgttcatttgtgacgctccgttttcgacgcttggttttttgtcgtgagatcgtcgtaaatgaaaaaccgtgacgatgtagcaacgaaaaaatagcgtcgtgtattagcatattccttgtagtggatacgacaccgcagagccgcaacacccgatccgaggatcagagtttcccctggagcaacatgacgggcgatgagagccgcgatggcgccttcaagaaggaaacgagcttcgtcgtcgccagtccgtttgaagatagagcaggttttcaccccggccaacactcatcgccacaccccggctaccacgccgcccacatggccatgaccaccaggcagcaccaagccacgggctctacccatgagcaccacacaaccacctccagggccgctgcaccaacatccaagaccttaaaaccacttcacccgagatccactgctaccccggccaaagagacgagataaaaggtgctgccttttccacccctgggcagcccccagtgccaagaatcaacagccggccaaaactggcctccatcggcctttcctgcagcaccgggagcagatgagccctggactgttcagatgtttaaataaactaaaatttaaaaaagacctcacgcatcaaattattcatcatatatattttttgaattttttctactatttattttgatttttttcattaccacgggtgcagctgagctcgggagccaaatagccgcttccacacatataccagctttcttcctcaccacactaccgcattttgaggtgtaattattttgtttatacgttgggtccagtgggggctagactctgtgacccgtttaattcgagctgcagttctgccgacagctacgcatgatgccatagttgcattgagcagtgaaaggcgtggacactggtggccgtcgtgctctacggccctgtttgtttcagaagttccaggactttttttagtcccaactaaaaagtccctagtccctacccgtttgttttcaaggactaaacagggactagaagtcattgaatgacatgcaaaaagaccatgttacccctgctaatatactagaagttattaaatgacatgctaaaagtaggggcactgttggaaaaagtgtcaaaaagtcccaaaaagtccctcccatagggacttcttcctttagtcccaaacacccccttttagtccctaaaagtccctcctgtttgtttcacatgggactaaaagggacttcttttagtccctacaccaaaaagtccctggaaacaaacacccccgtaagatggcggcaagacaaccaaccccaagaacagagttaagaagatagtcaagaaagtcaaaaagttattcaagaatggcaaggatcttcataggatctctgctgctgtggaagaagtggttcttcaagctaagcagttggccgagctgcgtcaaaggtacgaactcgtacatgacactggtgttggttctagcattgaccctcgtgtgatggctcaatacaaagatgtgacagagctcgttggcattgaagataccagagatgagttgatcaacatgctgactgggggtgatgattggttgaatcaacccctgaagacaatctccattgttggatttggcgggttgggcaagacaactcttgcaaaagcagcatatgacaagatcaaagtgcattttaattgtgatgcatttgtttcggtttctcaaagtccggacgtaaagaaagttttcaagaatattctctatgaacttgacaagcacaagtatgcacacattcgtaacgaacaatgggaagaaaggcatctcattgatgagctcatagaattccttaatggcaagaggtatgctttttttctattacaactcgatgaccatttagtaaaatcatgacacttttggcatagtatatatgtattctcacatcatatcattgatccactatatatagttttctcgtgttcatataaattggtgaggttttcacttgtgaattttcacttggatgtcatataataaagttatgaagatctaaaggtttttcttccttgattgaaagaaggttcaccaaattactggctagatttttttatggttaatttattacatacttttaatatagggtgtcacattaggatatttgttgttacatatatatatttttttcctgtgatagttgtttgattttttccctatttcggaagcttgcaatataggtttagaattcaaagggagatggagcaaagcgaaacttgattgattttttttagaatgttctttgggcatttgaaatgtatttggcaagcacatagtttaaaaaataaaacacttaactcgcacatttacatgactagatttactataatgttcatatatttggcacacaaaattttcccgtgacagttgtttttgggttttccctaatatgagtacttgagatacacatcaaaattatacatgatgccgaaatgaaactttgctgaaatttaatttattatgctttgttaggaaagcaacttgtattccatgaggccataggccggtatatatacatgtacatgcattggactatatgcaggaaaccccttatatattgggataaatacaaaagggtatatgacttatagtacaactctaacacccccccccccccaaactcatggtggatgaacaacactgagtttggaaagataaaagccatgttgtgctctagtctgggccctcgtcaggaaatccgccaactgtaactcggaaggcacatactggagagcaataacctgatcctgcacaccagcgcgcacatagaaagcatcaacatcaatatgcttggtgagctcatgcttcataggatcgcgctcaatgctaatagcacctgtactgtcagataagagcagagtcggtgtagtgacagaaacaccaaaatcctgaagtaaccaccgtaaccaagtcacctttgccgtcaaaagagccattgctcgcaactcagcctctgcactcgaacgggaaactgcaacctgtttcttcgtcttccaggcaatgagagaaccaccaagaaaaacacagtaagcagacaatgaacggcgatctgaaggatcactcgcccacgtagcatccgaataggcctgaagctgtaaagaactggagcgaggaaagaatagacggtgagagatcgtgccccgaagatatcggagaacacggaggagatgactatagtgaaccgatgtgggagcagagacaaactgacttagaatatgaacacggtaagagatatccggacaagtgacagctagataaacaagactgccaacaagatgacgataacgcgtcggatcaggcagaggatcatcatcagtagcacagaggtgaacattgagcttcataggagtctcaacaatgcgctcgtcagtaagagcagcacgagcaagaagatcctggatatacttttcctggaagataaaaaagccatcacaggtagaagagacttcaatcccaaggaagtagcgaagaggtccaagatcagacataaggaactgctcactaagacgggccttgacaaaggcaatgtactcggggtcatccccagtgatgatcatgtcatcaacatagagaagaagaagagtccgaccacgaggggaaagataaataaacaatgctggatcctgagcactggctgaaaaaccagcagcagtcaccacagaagcaaaacgctcaaaccaggcacggggggcttgcttaaggccatagagagagcgacgaagacgacatgccatgccataaggaacagaatacccaggtggtgggtgcatgtacacctcctcacgtagctcaccattaagaaaagcattcttaacatcaagctgagagatagaccagtggcgggcagaggccacggtaagaagtgtacgaacagtggtcatatgggtgttggggaacgtagcatgggaaacaaaaaaattcctacgctcacgaagacctatcatggtgatgattatctacgacagggagattagatctacatacccttgtagatcgctcagcgggaagcgttttaataaacgtggatgatgtagtggtacgcttgtgagatccaaatccccgtcccacgaacagccccgcgatccgtcccacgaaccgtcttgcgatccatcccgatcaagtaccgaacggacggcacctccgcgttcagcacacgtacagctcaatgacgatctccgccttcttgatccagcaagaggggcggggaggaagatgagttcaccggcagcctaacggtgctccggtggtggtggtgttgctattcctgcagggcttcacctaagctccgcagaaacgcgatctagaggaaaaacggagaagtatagatgtctagatctgagttgcacatggcaaagttgtctcaaatcagccctagacctctagtatatataggaggaagggggaggggcctgccttgaggctcaaggagccccaagggctgcgccaccaagaggagttggagtcctcctccaatcctagtccaactaggattggaaggaggagtccttctcttccttcccacctttccctttttttttctttctcctctttttggttttttctttctatcttgcgcaagacagccttgggctgaccctacctacttggtgcgccacccccaaggtccttgggccctcccgggtgggtggtccccctcccggtgaagatccggaacccattcgttattcccggtacattaccggtaatgcccgaaaaccttccggtaaccaaatgaagtcatcctatatagcaatcttcgtttccggaccattccggaactcctcgtgatgtcctggatctcatccgggactccgaacaaaacttcgatcaccagcacctataactcaactataccgaaacgtcaccgaaccttaagtgtgcagaccttgcgggttcgagaactatgtagacatgacctgagacacctctcagtcaatatccaatagcaggacctggatgtccatattggatcctacatattctatgataatcttatcggttgaaccactatgccaaggattcatataatcccgtataccattccctttgtccttcggtatgttacttgcccgagattcgatcgtcggtatccaataccttatttcaatctcgttaccggcaagtctctttactcgttctgcaatacaagatcccgtgtctaactcattagccacattgcttgcaaggcttgtttgtgatgttgtattaccgagtgggccctgagatacctctccgtaacatggagtgacaaatcccagtcttgatccatgccaacaccacagacatcttcggagatacccgtagtgcatctttatagtcacccagttacattgcgatgtttgatacatacaaagcattcctccgatgtcagggagttgcatgatctcaaggtcataggaatagatacattgacatgcataaaactgtagcagtaaacttatacgatcatatgctacgttcatagtttggtcttgtccatcacatcattcccctaatgatgtgatcccgttatcaagtgacaacaccttgtccatggtcaggaaaccttaaccatcttttatcaacgagctagtcaactagaggctaactagggatagtgttttatctatgtacccacacatgtatttgagtttccaatcaatacaattatagcatggataataaacgattatcatgaacaaggaaatataataataactaatttattattgcctctagggcatatttccaacagtctcccacttgcactagagtcaataatttagttcacatcactatgtgattttaacgaatctaacacccatacagttctggggttcgatcacgtcttgcttgtaagagaggttttagtcaacgagtctgaactcttcagatccatgagtgcttcacaaatctctatgttatcctgaagacgtttgctattacgtgccatttggaactattccaattgactactctactatacgaatccggtttactacttaaagtcatccggattaatgcaaagcttgcatcggcgtaaccctttacgacgaactcttttatcacctccataatcgagaaaaattccttagttcaccagttactaaggataacttttgaccactgtccagtaatcctattgtagatcacttttgtaccccttgacagtttcatggcaaggcacacatcaggtgcagtacacagcatagcatactatagagcctacggcttaagcataggggatgaccttcgtccttactctttcttctgctgtggtcgggctttgagtcttactcaaattcataccttacaacacagctaagaactccttcttcgcttatctattttgaacttattcaaaaacttgtcaaggcatgcatttcattgaaagtttcattaagcgtcttgatctatctctatagatcttgatgctaaatgttcaagtagcttaatccaggttttcctttgaaaaactcctttcaagcaaccctatatgctttacagaaattccacattatttccaatcaacaatatgtcaaccacatatattgatcagaaatactatagtgctcccactcacttacttggaaatacaagtttctcataaactttgtataaaccaaaaaatctttgatcatctcatcaaagtgcttattccaactccgagatgcttactccagtccttggaaggattgctggagcttgcatacttgctagcatccttaggatcgacaaaaccttctggttgtatcacatacaacctttcctcaagcaaaccgtcgaggaaacaacgttttgacatccatctgcaagatgcagcaactgctaacacaattccaacagacttttagcatcactacaagtgagaaagtctcatcatagtcaactccttgaacttgtcggaaacatctttgcgacaagtcgagcttttcttaacagtgaccgtcaccatcattgtctgtcttccttattaatatccatgtgctcttaacagtcttacgaccattaagtagttcttccaaagtcaccactttgttttcatacatggatcctctctcggatttcatggcctccagccattagtcggaatccaggcccactatcgcttctccatagctcgtaggttcatttgttgtcaaacaatatgacctccaagacagggttaccataccactctggagtagtacgtgaccttgtcggcctactaggtttgtaataacttgatctgaagcttcatgatcactatcatcagctcccacttcaattagtgtaggcgccacaggaacaacttcctgcgccctgctacatactggttgaagcgatggttcaataacctcataaattttccaccatcctcccactcaattctttcgagagaaactctttcttgagaaagtacccgtttccagaaacaaacactttgcttccaggtctgagataggaggtatacccaactattttggatactctatgaagatgcatttatccactttgggttcgagcttatcagactgaaactttttcacataagcgtcgcagccccaaatctttcagaaacgacagctaaggtttctccaaactacagtttatacggtgtaatctcaatggaaatacgtggtgccctatttaaagtgaatgcggttgtctctaatgcataatccccaaaacattacagtggtaattcgataagagacatcacagtatgcaccatattcaatagtgcacggttatgacgttcggacacgccatcgtactatggtgttccaggtggcattagttgtgaaacaattttcacattgtcttaaattgtgtaccaaactcgcaactcaaacaatcatctctacgatcatatcgtagacattttatcctcttgtcacaacgatcttcaacttcactctgaaattacttgaacctttcaataattcagacttatgtttcatcaagtaaatatactagtatctactcaaatcatcagtgaagtaagaacataatgatatccactgcgtgcctaagcactcattagactgcatacatcaaaatgtattacttccaacaagtcacttatctccttttcatctcaatgaaaacgaggccttcagtcatcttacctatgtggcatgatttgcacgtctcacgtgattcaaagtcaagtgaatccgaacaatccatctgtatggagttccttcatgcagttacaccaataggcatggtttgcatgcctcaaacgtttcaaaaacgagtgagtctcaagatccatcagtatggaacttcgtcatgcgtttttacaccaatatgactcaagtggcagtgccacaagaaagttgtactatcatcactactttgtatcctttggcatcaatatcatgaacatgtgtattactacgatcgaaattcaatgaaccactcacattggtgtatgaccattgaaggtattattcatccaaacagaataaccttttattctatgacttaaacgaacaaccatgttgcaataaacatgatccaaacatattcatgctcaacgcaaacaccaaacaacacttaggttcaacaataatcccgatggtagagggagcgtgcgatgtcgatcatatcaaccttggaaacacttccaacacatcgtcacctcacctttagctagtatctgtttattccacagcttttatttcgagtcactaacacttagcaacctgaaccggtatctaataccctggtgcaactaggagtactagtaaagcacacatcaaaaacatgtatatccaatataccttttgtcgactctgccagccttctcatctaccaagtaactagggcagttccgcctcagtgactgttcccctcataacagaagcactttagtctcaggtctgggttcaaccttgggtttcttcactagagcagcaactggtttgccgtttcatgaagtatcccttcttgcccttgcccttcttgaaaccagtggttctactaaccatcaacacttgatgctccaatttgatttttactttcgcgacgtcaaacatcgtgaattgctcaaggatcatcatatctatccttgatatattatagttcatcacaaagttgtagcagcttggtgacagtgactttggagaaccatcactatctcatctggaagattaactcccacttgattcaagcaatttgtagcactcagacaatctgagcacatgctcaacgattgagcttcttctcccttactttgtatgcaaagaatcatgttgaaggttttgtatccatcaacacgggcacaagcatgaaatcttaatttcatctcttgaaacatctcatatgtctcgcgacatttcacaacgtcttccttgccttacttctaagccgtttaagcattacacactgaactatcatgtagtcatcaaaaatcatgtatgttggatgttcgcaacatcaacagacgacgttcggggtttaccacactgagcggtgcattaaggacataagccttctatgcagcaacgaggacaatcctcagttcacggaccaagtccgcataattgctactatcatccttcaactaaattttctctaggaacatatctaaaatagtagagctacaacgtatgctacgacataatttgtgaagacgttttgactatgttcatgaaaaaattgagtttagcaaataatattactaataactcccactcaaaaaatacatctctctagtcatttgagtggtgcatgatccaaattcactagctcaagtctgatcatcacgtcagttgagtttagctacaatggtgaacatctccatgttgatcatatcaactatatgattcatgctcgaccttttggtctcctgtgttccgaggcaatgtctgtacatgctagcctcatcaagtttaacccgagtgttccgcgtgtgcaactgtttttgcacccgttgtatgtgaacgttgagtctatcacacccgatcatcacgtggtgtctcgaaacgatgaactgtagcaacggtgcacagtcagggagaacataattttatcttaaaattttagtgagagatcaccttataatgctactgccgttctaagcaaaataaggtgcataaaaggattaacatcacatgcaaatcataagtgacatgatatggccatgaactccgtgcttctcgatctccatcactgaagcaccggcatgatctccatcgtcaccggtgccacaccatgatctccatcattgtgtcgccatcatggttgtcatgctatctatgctattactactaaagctacaacctagcaatatagtaaacgcatctgcaagcacaaatgttagtttaaagacaaccctatggctcctgccggttgccgtagcatcgacgtgcaagtcgatattaactattacaacatgacacatctcatacatccaatatatcacatcatgttgttggccatatcacatcacaagcataccctgcaaaaacaagttagacatcctctaacttgttgttgcttgttttacgtggctgctatgggtatctagtatgatcgcatcttacttacacaaaaaccacaacggtgatgagtaagttgctatttcaccttctccaaggaccgcctcgttcaaatctgattcaactaaagttgaagaaacaggcacccaccagtcaccttgatgcaatcacattgcatgttaacggtgaaaccagtctctctaggttacgagtaatgtcggtctgggccgcttcgattcaacaatgccgccgaatcgagaaaagacttaggagggcagcaacttaaacatcaacgctcacaaacccttttgtgatctactcgagaatatcatctacgcatgaacctagatcatgatgccactgttggggaacgtagcatgggaaacaaaaaaattcctacgctcacgaagacctatcatggtgatgatcatctacgagagggagattagatctacatacccttgtagatcgctcagcgggaagcattttaataaacacggatgatgtagtggtacgcttgtgagatccaaatctccgtcccatgaacagccccgcgatccgtcccacgaaccgccttgcgatccatcccaatgaagtaccgaacggacggcacctccgcgttcagcacacgtacagctcgatgacgatctccgccttcttgatccagcaagagaggcggggaggaagatgagttcaccggtagcctaacaacgctccggtggtggtggtgttgctattcctgtagggcttcgcctaagctccgcagaaacgcgatctagaggaaaaacggagaagtatagatgtctagatctgagttgcacgtggcaaagttgtctcaaatcagccctagacctctagtatatataggaggaagggggaggggcttgccttgaggctcaaggagccccatgggctgcaccaccaaggaggagttggagtcctcatccaatcctagtccaactaggattggaaggaggagtccttctcttccttcccacctctagggcatatttccaacaatctcccacttgcactagagtcaataatctagttcacatcactatgtgattttaacgaatctaacacccatacagttctggggttcgatcacgtcttgcttgtaagagaggttttagtcaacgagtctgaactcttcagatccgtgagtgctttacaaatctctatgttatcctgcagacgtttgctattacgtgccatttggaactattccaattgactactctactatacgaatccggtttactacttaaagtcatccggattaatgcaaagcttgcatcggcgtaaccctttacgacaaactcttttatcacctccataatcgagaaaaattccttagttcaccagttactaaggattacttttgaccgctgaccagtaatcctattgtggatcacttttgtaccccttgacagtttcatggcaaggcacacatcaggtgcaatacacagcatagcatactatagagcctacgacttaagcataggggacgaccttcgtccttactctttcttctgccgtggtcgggctttgagtcttactcaaattcataccttacaacacagctaagaactccttcttcgcttatctattttgaacttctataaaaacttgtcaaggcatgcatttcattgaaagtttcattaagcgtcttgatctatctctatagatcttgatgctaaatgttcaagtagcttaatccaggttttcctttgaaaaactcctttcaaacaaccatatatgctttacagaaattccacattatttccaatcaacaatatgtcagccacatatactaatcagaaatactatagtgctcccactcacttacttggaaatacaagtttctcataaacttcgtataaaccaaaaaatctttgatcatctcatcaaagtgcttattccaactccgagatgcttactccagtccttggaaggatcgctggagcttgcatacttgctagcatccttaggatcgacaaaaccttctggtggtatcacatacaacctttcctcaagcaaaccgtcgaggaaacaacgttttgacatccatctgcaagatgcagcaactgctaacacaattccaacagacttttagcatcactacgagtgagaaagtctcatcatagtgatgagctttgtgacgctcaagagaaccatcggagcgagtcttaaccttctagacccacttacaagtgatgggacggactccaggaggaagggaaacaagagcccacgtaccagtgcgttcaagagcagcaatctcctttgccatcgcaaactgccattcaggatgaacaacaacctcatgataagaagtcggctcaagaacagcagcaccagcggtggaaaagccaaagcgattaacagacggatgaggacgagaacgcaagccataagtaggctgagacgaggatgaggacacgtccacagaggcgtccacaggacgtgaacgacgagtgtaacactgaggaaaagatggaacaatgggaggaggaatcgccaaggtagaatcggggggtggcgacgaagaaggcaccggagaggaaggtgtagaatccggtgacatgctaggcgaggaaaccgtggaagatggtggcaacaaatcgatgggaggtggggaagcaaagggagtggaacgaataggcaaaggctcgacggatgtgataggtgtatcaggaaaagtgaggaaagagatatcctccaatgaaagggtcgaggaagatgggcgtggatagaaaggatgagactcatcaaaagtcacatcccgagagatacgcatccgacgaccgagaggatcccaacaacgatagcacttatgctcatcactatagcctaagaagacacactcaacacactgagcggtgggggccgccgccagcagaagccgcaacagcagcaggcgtcgggcgccggtggggcgccccacttccagccgccgcctcctccgtgggccgccgggcagaacccgtggacgggcgtcgtccacgcctatcacatgcccgttccgcggcctcctacaccgggactccttggcccccgtccagcgggccaccaggcgttcgtcgccgcctgatgacccacaagtataggggatctatcgtagtccttttgataagtaagagtgtcaaacccaacgaggagcagaaggatatgacaagtggttttcagcaaggtattcactacaagcactgaagttgtcggtaacagatagttctgtgataagataattcgtaaccggtagcaagtaacagaagtaacaatggtgcagcaatatggcccaatcccttttgcagcaagggacaaccctgaacaaactcaaatataaagcaagagctcctgaggacacatgggaatttctgtctaggtagttttcatcacgttcatacgattcgcgttcgttactttgatagtttgatatgtgggtggacctgtgcttgggtgctgcccttacttggacaaacctcccacttatgattaacccctcacgcaagcatccgcaactacgaaagaagtattaagacaaagtctaaccatagcattaaactagtggatccaaatcagccccttgcaaagcaacgcataaacttgggtttaagcttctgtcactctagcaacccatcatctacttattacttcccaatgtcttcctctaggcccaaataatggtgaagtgttatgtagtcgacgttcacataacaccactagaggagagacaacatacatcatatcaaaataccgaacaaataccaaattcacatgactatttctagcaagacttatcccatgtcctcatgaacaaaagtaactactcacaaagcataaatatgatcataatcagagaggtaataaatatcatcaaggatctgaacatataatcttccaccaagtaatccaacaaacatcaactacaaggagtaattaacactactagcaaccatacaagtaccaatcggagttgtgagacgtagattggatacaagagatgaactagggtttggagatgagacggtgctgatgaagatattgctggagatgagtcccctccaatgagagaggtgttggtgatgacgatggcgacgattcccccttccaggagggaaatttccccggcaggacagccctgccgcagctctagattggttctgctcaagtttcgcctcgtggcggcagcgtttcttcccgaaagctccgtattgatgttttctggaacgaaacccttcatatagcggaagttgggcgtcacagagccaacagggggcccacgagccaccacggcgcggccaggggggcccgcgccgtgcaggctcatggcctcctactggcgctcctccggtatttctgtcgcccagtattttttatatattccaaaataatcctccattgattttcacggcttttggagttgcgcagaataggtgtcccagacttgctcctatttctgtccagaatctcagctgccggtattctccctcttcatgtaaatcttgcaaaataagagagaaaaggcataagtattgcaccaaaaagtataataacagtccaaagtgcgataaatatcaacatgaaagcatgatgcaaaatggacgtatcaactcccccaagcttagacctcgcttgtccttaagcgaaagccgagatcaaataaatatgcccacatgtttagagatagaggtgtcgagaaaatagaatacgggcatgcaggcatcatgatcacaaatagaacaacaataaagtcatataaactcttatgctaaagtgataattccttcacaatgtaaagaatggatcaagaaccttattgagagtcaacaaccaatagtcctcagtcatcgaagcaattggaatttatcataacatgggaaagagtcaaagaagagcttataaagcaaacccacatactcaatcatcatttagtcttccacaattgctaaaattcacattgtactcatgggatcaaagtttctgttggacacagagaaagataggggcttgtagttttgcctcccaacagtttacctcaagggtaatatcaaatataataattcatgagtacctttttccaagctaaaatatgaatatagatctttccctaacacatgacgcttgccaagataatggcaaaaaggaattggtgttgatcaccatgactcttttaaagatcaaaagtaaaggtacaagaaaggcccttcgcagagggaagcagaggttgtcatgcgcttttaaagtttggatgcgtgatctcttagtgtgaaggaacgtcactttgtattgccccctgtgataaagaactttattatgcagtccgtcgcttttatgtcttcttcatcacaggttcgtacaaagcttattttccaaacactaatagagcatacatatttagagagcaaaaaaaatttattgcttgcaccgatgacaacttacttgaaggatcttattcaatccataggtaggtatggtggactctcatggccaaactggtttgaaggttcatggatgcacaagtagtatctctacttagtgcgggagttttggctaatatgaggtggaagcaagcatcacatgtttaagggatctctagtcatattgcattgttcagaaccaagcaggcataaaccattatgttgtcttccttgtccaacatctacttcttagcatgtaatagttcaatgagtgttcacaatcatggatggtgtcaaagatgatatatttatatgtgaacctctctttctttattacttcatattatttgcaacaatgactaagatctacgtttgtctacccacaacaagtttgaatcaacattcttcttatatgtgaggctaacacttcccataagatcttcatatgatctttcatgcttttgttcttttactattctttctcaaggtcatggcatgaagcaaagcccttaactaaaacacctcttgatatataactcacgtgaacgattacaaaggggagtaaccaaaagtgaaactaaaatcaagatcaaactaaagaatttattctactagaaaaagataaaactgaaaagaagataaagctgaaaacaaaaataaaagcaaaagatatgaaggtgatacgatactggggcaactcccccaagcttggcacaagccaagggagtgcccatacccatgtgtttaattgtcttccttcggaggtgatggtggtggagttgtcctgcctttttgttccaagagggccattagtctttggtttataccttggagctctgtgatttgtttttccagcaaaacaatcttacgagtgagataagtattgtgcacgcgagttatctcaaataacctcaagagtttgatctcctcctttgttttgcccttgatttcttccaacgatctccccgtgacttccactcttttcagatcagcatttacttcttcatagacttgagagaaatcgttctctccaacagattcctgaaaggacatctttgtgctaaacctgtcgctgaaattggctcgaaacgaaaacagaggataattgcgtgatacgagggtcagacctttcgggagaatatataatgattttttaccgaccaaaagggaagtcccacgcgaaaacggagttcgggaggcacacgaggtgcccacgagccaccaccgcgcggccaggggggccgcggcgtgcaagctcgtggccgcctcgtgcactttccggacttccttgaatttttctatttttctaaatattccaaaactgagaaaaatcgctacggggaaagttttgcagtcagttttcttaccgtaactcgtacctctttgttttcggagtgtgaaacaggctggtaaacatctctgatgtattattttggggttatagtattaattatatcgctatcagcattcataggagtacctgagatataatgcttgattctttgcccatttacaaccctcggaaagttgccttccgcgttattgattttgatggcaccgtaacaatatacttcctcgacaatatagggaccttcccatttagagagaagcttgcctgcaaaaaatcttaaacgagagttgtatagcaagacatgatcacctacattaaactcacgcttttgtatccgtctatcgtgccacctcttaaccttttccttaaacagcttggcattttcatatgcatgagttctccattcatctagcgagctaatatcaaataacctcttctcaccagcaagtttgaaatcaaagttgagctctttgattgcccaataagctttatgctctagttcaagaggtaaatgacacgctttaccgtaaaccattttgtatggtgacatgcccatggtattcttataagcagtcctataagcccacagtgcatcatcaagtttgctagaccaattcattcgggacctattgacagtcttttgcaagatcagtttgatctctctgttactcaactccacttgtccactgggctgaggatgatatggagatgcaactctatggttgatgtcatacttagcaagcatcttacggaaaacaccatgaatgaagtgtgaaccactttcagtcatcaaatatctagggactccaaatctcgggaagatgacttatttaagcatcttaatagaggtgtgatgatcagcactactagtgggaatagcctccacccacttagtaacgtaatccacaaccactagaatgtgagtatacccgttggactttggaaaaggtcccatataatcaaagccccatacgtcaaatggttcaatcaccagtgagtagttcataggcatttcctgacgtctactaatattacctattctttggcactcatcacaagacaagacaaacttacgggcatccttgaagagagtaggccagtaaaagccggattgcaataccttgtgggcagttctatctcctgcgtggtgtcctccgtaggcttcagagtgacacttctgtaggatctgtccctgttcatgttctggtacacaacgtctaataacgccatctactccttccttataaaggtgagggtcatcccaaaagtaatgtctcaaatcatagaagaatttcttcttctgttggtatgtgaaactaggtggtatatattttgccacaataaagttggcataatcagcataccaaggtgtactgtgtgaggcattgacgacattcaattgctcatcagggaagctatcattgataggttgtgggtcatcaaggacattctccaacctagacaggttatctgctacgggattctctactcccttcctatcgacaatatgcaagtcaaactcttgtagcaagagaacccatctaatgagtctaggcttagcatctttcttttccatgaggtacttgatagcagcatggtcggtgtgaacagtgattttggaatcaacgatataagatctgaacttatcacaagcaaacacgactgctaaaaattctttgtcggtggtagcgtagtttctgtgggcactgtctagagttttactagcgtaatgtatgacatttaatttcttgtcaactctttgtcctaggacagcaccaacagcataatcactggcgtcacacatgatttcaaaaggtatgttccagtcaggtggttggacaataggtgcagtttttaaggccttcttaagtatttcaaaagcttcttcacaatcatcatcaaaaacaaatggaacatccttttgcaagagattagtgagaggcctataaatcttagagaaatctttaataaaccttctatagaaaccagcgtgaccaaggaaacttcttatacctttgatatctgtagggcatggcattttctcgatagcatcgactttagccttatcaacttcaatacctctttcagaaattttgtgtcctaagacaatgccttcattaaccataaagtggcacttctcccaattcaagacgaggttcttgtctttatatatctgcaaaactcgattaaggttgctcaagcaatcatcgaaagacgatccataaacggaaaagtcatccatgaaaacctcaacaatcttttcacaaaagtcagagaatatagccatcatacatctttggaaggtggcaggtgcattacacaagccaaaaggcatacgtctataggcaaaggtaccgaaaggacaagtgaaagtggttttctcctgatcagattgggcgacaagtatttgggagaaaccagaataaccatctaggaagcagaagtgtgtgtgtttagacagcctctctagcatttgatcgatgaatggcaaggggtaatggtctttcctagtggccttgttcatctttctaaaatcaattaccatcctatagccagtgataatcctttgcgggatcaattcatctttatcattagggacaacggtaatacctcctttcttaggaacgcagtgaactgggcttacccaatcactatgagcaacaggataaataataccagcctcgagaagctttagtatctcatttctcactacctccttcatcttaggatttaaccttcgttgatgatcagcaactggtttggaatcaggatcagttttgatcttatgctgacataaagtgggactaatgcccttgagatcatcaagagtatatccaatagcagcacagtgctttctcagagttttcaataatttctcttcttcttgctttgaaagcttagcactgattataacaggatatatctctttctcatcaagataagcatacttgagagtattaggtaactgtttaagctcaaacacaggatcacccttaggtggaggtggatctccaagcaactcgacaggcaaattattcctaaggagaggctgctgatcaaaaataactctatctatctcatccctttcctccatatgcatatcgttttcatgctcaagcaagtattgctctaagggatcagtaggagacacaacaatagaagcaagagcaatggtttcatcactactagacaattctttttcatggggttgtctgccaaacttagagaaattgaattcatgcagcacaccctcaaagcctacagtaacggtttgtttctcacagtcaatttgagcattgacagtattgaggaagggcctaccaaatataattgggcaaaagctatcttgtgtggtagcaaggataagaaaatcagtaggatacttaattttaccacacaagacttcaacgtctctaacaattcccaatggacagatagtgtctctattagcaagctgaatagtgatatcaatgaattccatctcaacaggtgcaatttcatccttgatttctttatataaagattcaggtattgcactaacactagcacccacatcacataaaccatgataatagtgatctcctatcttaacagatactacaggtgtgccaacaacaggtcgatgcttgtctctatcatgaggtttagcaattctagcagcatcttcacagaagtgaataatatgcccatcgacgttgtcagtcaagagatctttaatgatagcaatactaggttcaactctaatttgctcagggggtgtaggtgttctagtatagcccttacgtatcacacttgaagctttggcatgatcctttattctcacagggaaaggtggtttctcaatgtaagtactaggaacaatgggatcatgataagcaataattttctcctcaactggatcgggttctactaaattgacttctataggaggatgatatttgaaccacttctcctcagggagattaatatgagcagcaaatgattcacacaaagaagctactatcttagagtcaaatccatgttgagcgctcaaatcacgaaaagcatctgtctcaacaaaaaatttaacgcaatcaaatttaatattcatacctgactccttaccttcatcaagctcccaatcttcagagttgcgtttaattctttccaataaatcccatttgaaatcaatatctctctttataaatgaaccggcacaagaagtatcaagcatggtgcgattgtaatgagaaagccgagcatagaagttctgagtaataatttctctcgagagctcatgattgggccatgaatataacattgacttaagcctcccccaatcttgagcgatactttctctatcacgaggccaaaaattatagatataattccgatcacgatgtaccaaatgcataggataaaacttctgatgaaattccaatttcaatcgattgttgttccatgatccagtatcatcacatagcctataccatgtcaatgctttatccctcaaagataagggaaataccttcttcttgacctcatcctcgggcaaacctgcaagcttaaataaaccacaaacttcatctacatagattagatgcaagtcgggatgtgatgttccatctcctgtaaaaggattagccaacagtttctctagcatacccgaaggaatttcataataaatatttttagtaggtgcagcgggttgaggagaaataccttgtgcttctgattgaggtgaagataccccgaacaagctcctcaaagtagtagtttccatagtaacaagtgacaataaatttcagcacactatataaatgtttccttaccaaattccacttaccaaaggcgcttcactccctggcaacggcgccagaaaagagtcttgatgacccacaagtataggggatgtatcataatcctttcgataagtaagagtgtcgaacccaacgaggagcagaaggatatgtcaagtggttttcagcaaggtattcactgcaagcactgaaattgtcgttaacagatagttgtgtgataaggtaattcgtaatcggtagcaagtaatagaagtaacaatggtgcagcaatatggcccaatcccttttgcagcaagggacaagcctgaacaaactcaaatataaagcaagagctcccgaggacacatgggaatttctgtctagctagttttcatcacgttcatatgattcgcgttcgttactttgatagtttgatatgtgggtggacctgtgcttgggtgctgcccttacttggacaaacctcccacttatgattaacccctcgcgcaagcatccgcaactacgaaagaagtattaagacaaagtctaaccatagcattaaactagtggatccaaatcagccccttgcaaagcaacgcataaactggggtttaagattctgtcactctagcaacccatcatatacttattacttcccaatgtcgtcctctaggcccaaataatggtgaagtgttatgtagtcgacgttcacataacaccactggaggagagacaacatacatcatatcaaaataccgaatgaataccaaattcacatgactatttctagcaagacttatcccatgtcctcaggaacaaaagtaactactcacaaagcataaatatgatcataatcagagaggtaataaatatcatcaaggatgtgaacatataatcttccaccaagtaatccaactagcatcaactataaggagtaattaaaactactagcaaccatacaagtaccaatcggagttgtcagacggagattggatacaagagatgaactagggtttggagatgagacggtgctgatgaagatgttactggagatgagtcccctccaacgagagaggtgttggtgatgacgatggcgacgattctcccttccggaagggaaatttccccggcaggacagccctgtcggagctctggattggttctgctcaagttccgcctcgtggcggcggcgtttcttcccgaaagctccgtattgattttttctggaacgaaacccttcatatagcggaagatgggcgtcagagagccaacagggggcccacaagccaccacggcgcggccaggggggcccgcgccatgcaggctcgtggcctcctgctggcgctcctccggtatttcttttgcccagtattttttatatattccaaaataattctccgttgattttcatggcttttggagttgcgcagaataggtgtcccagacttgctcctatttcagtccagaatctcagctgccggtattctccctcttcttgtaaatcttgcaaaataagagagaaaaggcataagtattgcacctaaaagtataataacagtccaatgtgcgataaatatgaacatgaaagcatgatgcaaaatggacgtatcaccgccccctaccaaccctacggcgccccgctcgcgccgccacccctcggtggttacggcacgcccacccaggcggaaccctacggagccctgctgccgtcgccggcccctgcaccatgggacctggccctcctggccgccctccactcagcgccgtctccgagcaactatgacggtggaggcgactggtacatggactcgggtgctactgcgcacatgacagctcatcccggtaatctatcctcttccactccagttcacacacccactcgtatcaccgttggcaatggttcttccttacctatcacccacgtccgtagcactagttttccctctagttccacacccatcaccatgtctaatgtgcttgtctctcctgaattagcaccagcctagtttccgtcaaatgtcttacccgtcagaatccacttactgttgaatttgacggtgttggtttttctctgaaggacgcccatacccggatggtgctgcaccgatgtgatagccctgacgatctttatcccatgcacgccggcaccttcacttccacgcccgtcgctctctccatcggcgtcgacctctggcacactcgcctaggccatctcaaccctgctgttttgcgtcaaatccttaggagtttttctttctcatgtaataagctcgccgagcatacttgtgaggcttgtcgcttgggcaagcatgtgcgtctttcctttagtacctctacttcagtttccacttttccttttcagttggttcatactgatgtttggacgtctcccattgcgagtaatactggctatatatactacttggtgatcttagatgactattctcattttgtgtggacttttcctcttctcgtaaatccgatgcattagccacactcaccgccttttatgcctatgtcaccactcagttcggtcgccccatactcgcactccaaacagataacagcaaagagtttgacaacgtcgctcttcgctccctcctcgcctctcacggcaccatcttctgcctcacttgtccctacacctcaccgcagaacggccgtgctgagcgcattatccacactcttaatgactacgtacgcacgttgctcttccacgccaacgtgcccgctcggttctgagccgatgcccttgccaccgcctctctcttagttaacattcgtccgtgtcgtccccggtggaactatgcccctcaccaccttctcttcggtacaccaccgtcctatgatggtcttcgcatatttgggtgtctctgttaccctagcactgtagccaccacgccacacaagcttgcaccccgctccatcccatgcatcttccttggctaccctcccaacaccaaaggttaccggtgctatgatcctatcacccatcgtgtgtacacctcgaggcacatgtacttcgtcgagatggtgtttccttttttcaggttcccccggcgacggatccttcggctcccgcccccgcgccccctacgtggagcgatgcgcggcggcaccccccggaggcccccccggcacggcgccttctgccgcccccacccgggttctcgactccctcacccgaggttgagtccgaccttgccaccaggtcctcggctccctcgcatgaggtcgagcctgcggggaccccacccgccaccccgaccggcgccgccactcctgcgacgggctcctcctcgacctcgcccgtcgcctcctccgcggctggttcggctggcgctgtcgtggcccctgccgccgtggcccccgccaccgacgccacggcccctgccgccgtgggagcccctggtgcggctgcggcccctgccgttgcgggcgcccctgctgcggctgcggcccctaccgccgcgggcgcccctcttgtggccgtggcccccgtcactgccgtggcacccgccgccctcgccggcccggtcacccgcgcccgtacaggagtgcatcggccgagcacacgctactccttcgacgagtatgcgtgcgctgcctcgacatcggcgccctcacccatccccacctccgctcttgccgcccttcaggatcctcattggctggctacgatgcaggaggagttctacgccctgtagcgcaaccatacgtggcagcttgttccgcgaccctctcatgccaatatcatctctggcaagtgggtgtttgctgctggctacgcctataggcatttccttggcaaatatgcaaaggattcccccacggtcttggagccttgcgttggtgttcccttgaagaggaaagggtgatgtagcacagcggcagaaagtatttccctcagtttgagaaccaaggtatcaatccagtaggaggactgcactggggtcacaagtacctgcacaaacacaaagagcttgcacccaacgctatgaaggggttgtcaatcccttatagattgattgcaaagtgagaactgaaagcaaaaagtaaacaaagcaaagtaaaagtaaaagctaagatgacaattgtgagtagacccgggggccgtagtgttcactagtggcttctctcatgaaggcaaatagacggagggtaaacaaattactgtcgagcaattgatagaaccgcgcaaagtcatgacgttatctacgcaatgatcatcatataggcatcacgtccaaaacaagtagaccaatactttctgcatctactactattagtccacacatcgaccgctatccagcatgcatctagtgtattgagttcaaaagaacagagtaacgctttaagcaagagacatgatgtagatgaacaaccccatatctacgacgaagctcatcttgttacccttgatggcaacaacacgatgcgtgccttgctgccccttctgtcactgggaaaggtcactgcaacggtatgaacccaacaccaagcacttctcccattgcaagaatcatagatctagttggccagaaaagaacccagactcgaagagacttacaaggatatcaaatcatgcatataagaaatcagcaaagactcaaatataattcatagataatctgatcataaatccacaattcatcggatctcgacaaacacaccgccaaagaagattacatcggatagatctccatgaagatcatggagaactttgtattgaagatacaagagagaaaagaagccatctagctaccaattatggacccgtaggtctaaagtagacaactcacgagtctttggagatgcaatggtgttgatgtagaagccctccagctccaaagttccctccggcagggcaccgggagggatctccagatgagatctcgcggaaaacgacggcttgcggcggcggaaaagtggtttcgtggatgccctgattttttacaggattttagggaatatataggatgaagatctaggtcagagggccaccaggggggcctcaagcttggccggcgcaagctcccccctggccgcgcggggcaggcttgtggggcccctggggcacctcttgcttggccctcaagtccttcgatcttttttggtccgggaaaaaatcattccggcgattttattctgtttggactccgttccaaaatcagatctgaaaagggtcaaaaacacggaaaaaacaggaactgacacttggcactgaattaataagttagtccccaaaaagatataaaaggtatataaaacatccaaagttgacaagataacagcatgaaatcatcaaaaattatagatacgtttgagacgtatcaagcatccccaagcttaactcctgctcgtcctcgagtagggaagtgataaagaatgaatttttgatgctttcatgctacctagcatgtaactcctcttatgtggcatgaatgttcagatccgttagattcaaaacaatagtttgctattgacgtggaaacaataatacttcaagcaaactagcaaggcaatcatgaactttcaaaataacaaggccaaaagaaagttatccctacaaaatcatatagcctggctatgctctatcatccttgcacaacaaatttaaatcatgcacaaccctggtattggccaagtaattgttttcacacctttactttctcaaactttttcaactctcacgcaatacatgagcgtgagccatggttatagcactataggtggaatggaatgtggtggaggttgtgaggtaaacaaggagaagatagtcacattaactaggcatatcaaagagctatggagttgctcatcaatagatatcaatgtgaatgagtagggattgccatacaagtgatgcactagagctaagagtatgtgaaagctctttgagaagaactagtgggtgtgcatccaacttgcttgctcatgaagacctaaggaaattttgaggatgcctatcattggaatatacaaccaagtaatataatgaaaaattcccactagctatatgatggtgacaaaacgagagactctcaatcatgaagatcatggtgctttaatatgaagcacaagtgtggaaatgagatagtagcattgtcccttctctcttttctctcatttttttggtgggctctttggccactttttttttggtgggcatctttggcaacttttcgtaaatgggcttctttggcctctttttatttcctcacatgggacaatgctctactaatgatgatcatcgcacattcaactcaaaacttagagcaatgatgactctatatgaaatgccttcggtagtgtactgtgacaatgatctagcatggcatagacattaatggaaacatcatgctagctatcttgtgatcatgcaatggcaatgtagaagtggtagcacaagtcatggtggtggttgcatggcaatatatctcggaatggctattgaaaatgccatagtaggtaggtatggtggctgatttgagggaggctatgtggtggtttatgtaccggcggaagttgcacggcactaaagaagatagtaatggtggaaggtgaaagtgcatctaaaccatggactcaacattagtcatgaagaactcatatacttgttgcaagaagtttattagtaatcaaaacaaagctttcaacgcatactcctaggggaagggttggttggtataaaccatcgcgtgatcccgaccgccactcaaaggatgacaatcaatagactaatcatgctcagacttcatcacatagcggttcaccatacgtgcatgctatgggaatcactaacttcaacacaagtatttctagatccacaacaccttactaacataactttaatattaccataaccacaactcaaaactaattgcaaggaatcaaacttctctaactactcaatgcacatgaaagcggaagttttcgtatccctttggataactacctcttttgagactattttcatagcatagatctaatgccaaaccacgcaccgccgtgctctaaaagatataagtgaagcacatagagcaaaatcaactagctcaaaagatataaatgagacacatgtgagctgaattgcctaacacaaaggatataagtgaagctcgacaaaatcacggtgagtgcatgtctctctctctaggtgtgcagcaaggatgattgtgacacaacaaaaataaaagactcctaagatacaagacgctccaagcaaaacacatatcacgtggtgaataaaaatatagcccaagtaatgttaccgatggattgaagacgaagaggggatgccttcccggggcatccccaagcttaggctttttgacatccttgaatcatcttggggtgccttgggcatccccaagcttaggcttttgccactctttatctttttgtccataagaacttcacccaaaacttgaaaacttcacaacacgaaacttaaatagaaactcgtgatatcattagtataagaaagcaaattaccacttccttaggtactatagcaaacttaaattctacttatgttggtgttgtgttactgtattttcaatcttccatggctagtacctgtgacatcctcgacttttgctgcagtaatgattgtaattaagcgacagtgatcccgcgctaatgatgccacatcatcgttaatgatatcaacgatctcgtgttggttgaaaccgaatcaaaattcgatgctttaagatgaagtcaaacgaggaaagaattcggttgataaaataaaaatgtcaggggagttataaaaattccctagcgaagtataaaaatgaatcgggcactttcggaataattgatgatcccaatatatttgaaaaaggagctttaaacaaaataagtaaagaaaaatatagtaagtgtaaaagaaataaataaaagaaagaagtaaaagtatatataataaattataaaatatagtaaataaaattaggtactaaaaagaattagaaataatagaaaaagaaaaacaaaacaaaaaaacaaaaggaaaaaaaaacaaccgagcccccccccccgggccgactgggccaaagtggcccagccggccaccatcatcaaaccctagcgctgaccctggctctcccccccgctctcccgttccccccagcgccgccgccaggggctctcgcctcgtcgcccgcaccacccctcgtggggggccccacctcccaccgacacctctccctctcgccacccccgcgagatcccacctctcccctcgggacctccctctctctcgtaacccccacccatggagaggcttctcccacctctcgttctctccctcccgtctcacctacccagcccgatccgccgcacccccagccgatcccccccacctacccacgacacccacgggaggaacccatcctcccttcggcttctccctccctccaagtaaactcctgtcggcctcccagatcccctcgcgcaccctcctagcgaccgccccttccctcggccccctcgtcctcccgggaggtcggccccaactccttccggggaccgagcccctttcccccatcgctctctactcccaccgagccggcagctcctgccggtccccctcctaccaccgccggcagcaaggccccgtcggctccacatcctccctccgacgacccggccctcccgtgcacacgtcggcctccccctggttccccgtcggccgagcccctacaccaccccttcctcccgctcggtccaggagggaccgggcagggagactcctcctcctcgtcacgccggttggccacctccgggaggcctctccggcgaccggcaccaccaccacgccaccaccgtcatcacctcgtcttcctcctcgccgtcacctccgcctcacgagaactccggcttcaccgggccctctcgtcaacgtcggtgagcccctcctcgggctcctcccaccatctccttcctcgcgtcgtcccggttccgttccggcagacggcactccgatccgacgccgttaggttcatgtaggagatcgtggagatgtagctctctctctgtgaagttgagcctctgttaacagagagatgagagttatgagttgagagaaagaaataataaaaataaatgttgtatttgcgtatgtatttttgtatgtatgagatgctcgtatgtatgtatttgtatatgtcggtatatgacggaatacgttatttgtatggatatgtatatgtgagtaaaaacatgtatttggcctaaagccacttaccggtggggccaacgcaccccgctgtctatgacagggaggccccacaacctcttttaaagaaaagtgaaaattaaaatataaaaataaaaataatgtttttatcaaataaataaatagatatattagttaattaattaattgggtaattagaatagttagagtatgacacgtgggccccccactaaattaatctgttcaattaatatttaatcttaattaaaacttgtgcctatgacgttcgggacccactggtcaattgaccagtcaactgtttatgtcagcatgacatcatgctgatgtcataatagcattttattaaattatttaaatctgttttttattcctaaattttaaataaaactttaaaaattaatataaaataatccataagtcagatcaaaatattttcaacatgaaagttgatcagcagaacgagacgaacccggatacacggtccattcgtctgtcacgcatccctagcatagcaaacatggaacatttccattgtttccagtctgacaggtagtagcccgagacccggaaaatatcgtcagatattcttccaacccgtctatgacggatcttgccatgtcatgcattgtgttgcaccgttgctattatttattgtttcttccccctcttcttaccggtagaccccgagactgacgctgctgccgggtacatctacgaccctgccgatcagtcctttgccgtagagcagcaaggcaagcaaaccccccttgatcattcctatatcgcctatgtctttcttcctactgcttgcattagtattttgctactgttgtagttagctcctatatctgatgcatagcctattttgatgaactgctactttcagtcatgtacctttaatatgcttagtataggtggagcagtcatcccctctgaccccgcagttcagttgccccgctttaatttcaagtctcgatccctgatcgacgagccagacccggcaccgcactcacaccccccttagttgtgcgacgcaacaacgatactgtcgggtaccagggtgacacctcgcaaagtactccttatgatatctctgcagtatagctagtcggtcatggttatcgagggtgattcctctttcaccatttccgacgatgcccctgtcggcaaccccccttcaagtgtgggaccctcgagggtgatacctctaggtccaccttgtcggttacattgttcggaatccagtgagggtgatacctcggattccccctgatgttacaaccacacagttacgtgaccatgttactgggaaacattgatggacaatgtttggcgggtggattcccgcatgtttgtgtcgatggcctaattaaaatgctaatggatttgggtatttgatctgggttggtcggatgaccttttatgcactaaccttctgcgtgggaagaattatgggtactcggcgtcgtagtatcagccgaagcttttcagatgtcagcaatgtagcggcgggtgcccgagtggtctgcatatgcatcgctcttattataaggggtgctaggactgacctcggccgcccacgcatcgtgcatgagcgcggagggcaagtgggcccacgaacccttcgtgcttaggagtagaccggcgggctggcctctctgttgagtcttaggtggggctgcgacatgtcgatattccgaggccgggcatgacccagaaaagtgtgtccggccagtgtgttatcgagcgtgttgggaactgtggtgcacccctgcagggaagaactaaactattcggatagccgtgtccacggttacaggacgacttggagttgtgctttgatcctatacaactacaactgttacttaactggatttgtttgcctcgggattgcttcctcgcagggagtcgagggaggatccttgggcgtgacctcactatttaattgctacaacaatatgactatatatttgtgttacttgttctcctctcgtctattgctgcaagaccctgaagatgctagtcttcgataggactaggccttctctctctattctcgcattgctgcagtcagtccacataacccccttctttgatactggtgcatacttagtatagttctgacgtaagacttgcgagtactttggatgagtactcaccgctgctttcctcccccttttccccgtgacccgttgctgcgaccagatgatggagcccaggagatggaattctccgccgacgacgccagctaccccgacggtgcctactactacgtggaggccgctgatgaccaggagtagttaggaggttcccaggcaggaggcctcgcctcgttcgatcgttgtatcttcttttgtgctagccttctctaaggcaccccatgttttatgtctgtactcagatatttgttgcttccgctgactcgtgttcttctcgagcttctgtattctagccctcgaggcccctggcttgtaatatgaagcttgtttattttaatttgtgtctagtgttgtgttgtgatatcttcccgtgagtccttgggtttgatcgtacgcatttgcgtgtaagattagcgtacgcttaaaccgagggcgtcacaagttggtatcagagccgactgcctgtaggtagccccctttccaactccttggccgaagttgagtctagtatttgaaaaactttactaacactgatgctatggcttacgggcccacatctcaattgggtggtattagtatcttttactcctttcctatactctgggctctactctctcttctctttcgggttaaagattttactaactctaactctaggttctcgtaaatactcccccccccccggagagccccaaattctagacgatgacttgatccatcagaagactccgaggataatctctgatgttcacttgagaacttgtgatcatcgcttttgcaatttcccttcctccgtcaacccctatggatcactacatacaaatgtcatccatactttcttttcaaattgctcttgttttacgagaggcaacgaattatcttattggggattggtccatcattagttgtcatgggtttcaaaattcttcgaactgctattcgatcttccggaatcttcggtagcctattcctcttgaccttctcacctgcttgcattacggttaactccatatgtctagccgcattcattaaaatcccttgtgattttcctatgatcttattgactctaccttggtgtgaattcacacaatcacgtgttgatattcataaaaaaaattctggcttagacgtccgttcagacggagctggttctcggtaaatcaactttggttggttgtccatctaagctttttcaacttacttgtatttgatcggatcatctgattatgatacaccagtctggaattcttaattccttggtgattaagtatcgatattttcagatgttctataaactgatgcactgcatcctatctccctctgattgattaccgatactcacatcagatcctttgtggactgccagactccttctaggttattatccgacgtcatcctttgctttcaaaaattcttttgattgcttcccctgacacataatgtcattggtaaactgtgtcttctccttctgatgagttgtatcctatacccttgtcagccatgcccttcaatcacgtgtcaattactcttgaagtttgcgttatatgttcctaagatgccccgacgggttgaacctatgcattactaaatcaatatggccctaagagtttcacgagtcttactcttctggtgttttgccggatattctttgaaagctacaacttgatcaagggcgaggagtaaatggcaggtgatgcattgaagaagtgggtgtcgaccttgaactttgtgttcatgcccatggaaacgacgttgatcctatcatagaaacttctcgtatcaataatcattcattatgtggtttaaatctggtatctgcgatcttgtcgtttgcaatcgtggttccgaccatgttgtcccaccttgatttctttctgagacaagttaaaatacttgtcttctttagatcaatacgccggtccaagccttaatgttgatctaccttcgagtattattccttagagcttgaggatataacggagctacataacttgtgagctcctcatcaactatgatatcttcattagttccaaattcctcgtgtttgagttgttggacatgcgggtacttcgataactgaatcgagtacacattgcgattcaacaacttttggtaatcttccttgcttacgaatttgtactcgatcatgtcattccaagctgttaagctgcaccatcattgtcatgttggagcttgaccatgctgtctgtgtcctccatctctggagcacatttccaacggtgcgttaagctcacctcgagcttttccacatcgtattggttgttttgaaaggcaattttgattctaagttagcagtcttgtctgttgttccgacaacctctcgctgcaccattcccttgcttgatgtcgtcgccgatcgattacatcttcgtgaagcttcttgacaaaggtgtcgtgatcatcatcagcatcccaagctcttgcagggtatcgaccgaatgcctgatgagaaataccatccttgcccctcgatgatatgtgttatcatcgacaaccttcttgccttccctcctacacaaacgtgttcatgttttgtgttgtccttcgagttccttgctaattcagcttatgtcaccttctaccttggagtattactatcttttctgtcaagaatgttgtgagcatcattgcacctcttacgaatccttgacatagtaatacttctcgccatcaccattcatttcttggtcccgtgttgtttctaaccggtataccgacaagtgaactctgatgtgtgattccaatacttctggcaaccctattgccttgaggttaatagcagattatttcaattttagtgtgttgggtgatgactcatcatttttgacattggttgtactactccgtccgtattcccgggtgcaccctttgaccaatgtttaattgttgttgatccctcgaacatgcgacattatatcatttgacttgacaaatgctatctccttgatattataaattttgaaaattcgtctctgtcaaaatcttgagggattgttgttgagcccatcggccgcaccctcaagttctccatggttcgtgatgaagcttttgaaagcactatctttgtacctaactcatgaagaatatgttgggtagaagaagtgtatttcccaaagttcacgtgcactctttccgtcgtgaatatgtgaaagttttgttttgcttcctctcgtgaaataccagatcattcacgcatgtgcgaagtgttatatgttatgaagagttgttatcttcacgtcatataacctctcttagcacgccaagccactgactggtttgatcaagggaaaagaagttccttcataagagttaatccagatttacacatggaaccttgttatcctcgataatggtttccaaatgaggactcagttacattttgacgtaagaattccacgtaggcacgaatgtcttgacattgtgttcatatgtcttaaagtcaaactcatgattcaaggatttgcttgtgtagttcatatcatgagaatcttgcatcttcatcttttcttctcaggcatcttgagtctgaggtatcctaacgccaatcagatctgaatctcggacagatatgatggttggaacattttcccaataattttaactttggtcttatgtaacccactacggtgatgtcttgtttggcacaccgggccgcaggacctattgttataaatccttccatgtgtaaggttcgccattctaccatgaggaaattgtatgacttagctttttaagtttttcctcatggttcctctttgtatacccataattacaacctttatctgatgaccatgtcgatactaccccgaagcacggatgtggtacttcaaatttcaacaggaacattggaagcgcaatgctcaattgttcctgatcaaatatccagaccgcgtggtatgggtaaacatcatgattcttcttgcctctttgtcaaaatggttatgtactggatgacctatcatgtatgccatactctatgttttcctcgggaatggtatactttaatacttgtgtgtgtgaacacattttccttcccattggtctctttgacctttcttgtggcataacttatctaagcagtgttaattccctgcttaggtaaaattctcggtatacaactctgtcagtaagaccctgttactattgtggataacatcccggtagccgccggtggacgagaaccttgcctattggtccgcctcatttcaacgagcaggaaaatggttctattcgtcccccgcacttggtactggcgttgttgccaacataattgacaggttaccctctgacatgtcttgctaccaagaccgtataatatgtcacccctcaacctattcttggccacatggtggacccataacccaaagttccacaggattgaaacctgactctcctgtacatctttgactccaaagtatccttggcacttggctcttatggaattcccgagccaccgttcaatggaccaatcgctcttcggtccggatattatccaacatactaaagatcaagtctgcattattcatgcgaatttgaaggctgctcagtctcgttagaaaggtcagtatgaccgtcatcatcaagatatggtctatcaacctggcgaaaaggcttatcttcgtgtcacaccaatgagaggtgcacatcgttttgggatcaagggcaagttagctcctcgttatattggtcctttcactgttctcgaaaggcgtggaagagtggcttatcaattggaactgccggcgaacctttctcaggttcacgatgtcttccatgtttctcagctccgtcgctgcttcaaggatcctattcgagcagtggatcatggtatgcttgagctgcaacaagacacctcttataaagagcatccggtcggcattctcgaccaagctgaatgtaagactcgtcgcaaagtcaccaagttcctcaaggtgcagtggtcaaatcattctaaagatgaagccacttgggaacgcgaggatcatcttcgtgatgaataccccgggctctttccctctacctcttaattctcgggacaagaattctcgttagtaggggagaattgtgacatcctcgacttttgctgcagtaatgattgtaattaagcgacagtgatcccgcgctaatgatgccacgtcatcgttaatgatatcaacgatcgcgtgttggttgaaaccgaatcaaaattcgatgctttaagatgaagtcaaacgaggaaagaattcggttgatgaaataaaaatgtcaagggagttataaaaattccctagcgaagtataaaaatgaatcgggcacttttggaataattgatgatcccaatatatttgaaaaaggagctttaaacaaaataagtaaagaaaaatatagtaagtgtaaaagaaataaataaaagaaagaagtaaaagtatatataataaattataaaatatagtaaataaaattaggtagtaaaaagaattagaaataatagaaaaagaaaaacaaaacaaaaaaaggaaaaaaaagcaaccgagcccccccccccccccccccccgcggccgactgggccaaagtggcccagccggccaccatcatcaaaccctagcgctgaccctggctctcccccccgctctcccgttccccccagcgccgccgccaggggctctcgcctcgtcgcctgcaccacccctcgtggggggccccacctcccaccgacacctctccctctcgccacccccgcgagatcccacctctcccctcgggacctccctctctctcgtaacccccacccatcgagaggcttctcccacctctcgttctctccctcccgtctcacctacccagcccgatccgccgcacccccagccgatccccccacctacccacgacacccacgggaggaacccatcctcccttcggcttctctctccctcccagtaaactcctgtcggcctcccagatcccctcgcgcaccctcctagcgaccgcccctcccctcggccccctcgtcctcccgggaggtcggccccaactcctcccggggaccgagcccctttcccccatcgctctctactcccaccgagccggcagctcctgccggtccccctcctaccaccgccggcagcaaggtcggctccacatcctccctccagcgacccggcactcccgtgcacacgtcggcctcccccctggttccccgtcggccgagcccctgcaccaccccttcctcccgctcggtccaggagggaccgggcagggagactcctcctcctcgtcacgccggttggccacctccgggaggcctctccggtgaccggcaccaccaccacgccaccaccgtcatcacctcgtcttcctcctcgccgtcacctccgcctcacgagaactacggcttcaccaggccctctcgtcaacgtcggtgagcccctcctcgggctcctcccaccatctccttccttgcgccgtcccggttccgttccggcagacggcactccgatccgacgccattaggttcgtgtaggagatcgtggagatgtagctctctctgtgtgaagttgagcctctgttaaaagagagatgagagttgtgagttgagagaaagaaataataaaaataaacgttgtatttgtgtatgtatttttgtatgtatgagatgctcatatgtatgtatttgtatatgtcggtatatggcggaatacgttatttgtatggatatgtatctgtgagtaaaaaggtgtatttggcctaaagcacttaccggtggggccaacgcaccccgctgtctatgaaagggaggccccacaacctcttttaaagaaaagtgaaaattaaaatataaaaataaaaataatgtttttatcaaataaataaatagatatattagttaattaattaattgggtaattagaatagttagagtatgacacgtgggcccccactaaattaatctgatgcatagcctattttgatgaactgctactttcagtcatgtacctttaatatgcttagtataggtggagtagtcatcccctgtgaccccacagttcagttgccccgctttaatttcaagtctcgatccctgatcgacgagccagacccggcaccgcactcacacccccccttagttgtgcgacgctacaatgatactgtcgggtaccgagagtgacacctcgcaaagtactcctgatgatatctctgcagtatagctagtcggtcatggttatcgagggtgattcctctttcaccatttccgacgatgcccctgtcggcaaccccccttcaagtgtgggaccctcgagggtgatacctctaggtccaccttgtcggttacattgttcggaatccagcgagggtgatacctcggattccccctgatgttacaaccacacagttacgtgaccatgttactgggaaacattgatggacaatgtttggcgggtggattcccgcgtgtttgtgtcgatggcctaattaaaatgctaatggatttgggtatttgatctgggttggtcggatgaccttttacgcactaaccttctgcgtgggaagaattatgggtactcgacgtcgtagtatcagtcgaagcttttcagacgtcagcaatgtagcggcgcgcgcccgagtggtctggatatgcatcgctcttgttataaggggtgctaggactgacctcggccgcccacgcatcgtgcaggagcgcggagggcaagtgggcccatgaacccttcgtgcttaggagtagaccggcgggctggcctctctgttgagtcttaggtggggctgcgacgtgtcgatattccaaggccgggcatgacccagaaaagtgtgtccggccagagtgttatcgagcgtgttgggaactgtggtgcacccctgcagggaagaactaaactattcggatagccgtgtccacggttacaggacgacttggagttgtgctttgatcctatgcaactacaactgttacttaactggatttgtttgcctcaggattgcttcctcgcagggagtcgagggaggatccttgggcgtgacctcactatttaattgctgcaacaatatgactatatatttgtgttacttgttctactctcgtctattgctgcaagaccctgaagatgctagtcttcgataggactaggccttctctctctattctcgcattgctgcagtcagtccacataacccccttctttgatactggtgcatacttagtatagttctgacgtaagacttgcgagtactttggatgagtactcaccgctgctttgctcccccttttccccgtgacccgttgctgcgaccagatgatggagcccaggagatggagttctccgccgacgacgccagctaccccgacagtgcctactactacgtggaggccgctgatgaccaggagtagttaggaggttcccaggcaggaggcctcgcctcgttcgatcgttgtatcttcttttgtgctagccttctctaaggcaccccatgttttatgtgtgtactcagatatttgttgcttccactgactcgtgttcttctcgagcttctgtattctagccctcgaggcccctggcttgtcatatgaagcttgtttattttaatttgtgtctagtgttgtgttgtgatatcttcccgtgagtccttgggttttatcgtacgcatttgcgtgtatgattagcgtattcttaaaccgagggcgtcacagtaccctccgatacaatccatagtttcatcaaaataagcaaccaactcaacaaaaatagaatctgttaacagcagaccagtctgtagcaatctgtaaggtttgtatacctctgttacttcaaaaattctgaaaaattacgacggcctgacgaatttgcgtagaaatcagcagaaaaaagaatcaactcaaaatctctcatagaaaataaatgaaaattcttttcatgagcagaaagtttctgtcttttccagcatgatcaaacgatcatccccaagactaatcataacggttttacttggtacaaacgcaaaaagaaacacaaaaaacacaatcataacagaattatgaaagtgtggaaaacacaaatcagaaagaaaaatgatagattcattgggttgcctcccaacaagcgcttttgtttaacgcccttagctaggcataatgtgatggaatcacgtatagtcatctttggtgctcaaaccataagtagccctcatcatagattcataatgcattcttattttctttgtaggaaaatgctccatgcccttctttagaggaaattgaaatctaatattcccttccttcatatcgatgatagcaccaatagtccttaggaaaggtctaccaagaatgatggggcatgaaggattgcaatctatgtcaagtacaatgaaatccacgggtacatagttcttttttgcaacaataagaacatcattgatccttcccatgggtttcttgatagtagaatcagcaagatgcaaattaagagaacactcttcaatctcatgaaaaccaacaatatcacataaagactttggaatagcagaaacactaccacccaaatcacataaagcattgcattcatagtttttgattttgattttgatgataggttcccactcatcatgaagttttctaggtatagagacttctagttcgagtttctcctcaagagatttcatcatagcatctacgatatgagcggtaaaagctttgctttggctataagcgtgtggagagtttgcaatggattgcatcaaggagatgcattcaaacaagcagcaactatcataattgaatcccttgaaatccaaagtggtagtttcattactacccatggttttgatctcttctactccactctccacacctttatcataaagataggtggactccgaatcattggggcgttcttcaaccaaagtggattcatatccagccccttcatcaataggtttgacacacgaaaataaagattcaagagaagtcacaccaagtactttaagatcttcgtgatttgcatcactagaacgcgcccttttaaaccattcatgcttagcacgtatttgggcggttctttctttgctctcattcatggagacacgcatagcttttaaagtttcatccaagttcaccttgggaggagcacatctaactttcaaagcatcaatatcacaagacatcctatcaacgctcttagccaaatcgtctatttttagtaatttttcctctatggacgcattgaaaaccttttgagagttgatgaactctttgatattactctctaaatcagagggtaatttgttgtggtttccataagtattgttgtagaagttgccatagttattagaggagttactaggaaaaggcctaggaatatagtttcctctaaaagcattgttgttgccaaaattattcctaccaacaaaattaacgtccaagctagcgttgctactctcaatcaaagaagatagtggcatgtcattaggatctacgggagtatttctactagcaaccaaattcattaactcatctagcttagcactaagcgagttaatttcctctataacgtgtacctttttgctagcaggtgacctttcagtgtgccactgagagtagttggtcatgatattgtctaggagtttggtagcatctcctaacgtgatttccatgaacgttccacctgaggcggaggacaagatgttgcgagaagcaaaattcaaaccagcgtaaaagatttgtataatcatccacaaactcaagccatgagcgggacaataactaatcattaatttcatcctctcccaagattgtgcaacgtgttcatgatcaagttgcttgaaattcatgatatcgttacggagagagataatcttagccgacggaaaatatttggatatgtaagcatctttgcacttattccaagaattgatactatttttaggcaaagaagaaaaccaagtttttgcacgatctcgtagagagaacggaaaaagtttcaacttaacaacatcattatccacatctttcttcttttgcatatcgcaaagttcaatgaaagtattaagatgggatgcggcatcttcactaggaaggccagaaaattgttctttcataacaagatttagcaaggcagcgttgatttcataagattccgcactagtggcgggagcaatcggagtgataataaaatcattattattagtactcgaaaagtcgtaaagtttggtgttttcagccatgatgacttcaacaaacaaacaagaacacaagcaagcaagaaaaacgggcgaaagaaaacggcaaatgaaaacggaaaaagagaaggcaaatgaaaacggcaaatgtgaagtgggggagaggaaaacgagaggcaactgacaaataaaagtaaatacaagagatgtgtttgtgacacttacttgatttctccccacgcaagaatcctccccggcaacggcgccagaaatccttctgctgctggctacgcctatagggatttccttggcaaatatgcaaaggaatcccccgcggccttggagccttgcgttggtgttcccttgaagaggaaagggtgatgtagcacagcggcggtaagtatttccctcagtttgagaaccaaggtatcaatccagtaggaggactgcactggggtcacaagtacctgcacaaacacaaagagcttgcacccaacgctatgaaggggttgtcaatcccttatagattgattgcaaagtgagaactgaaagcaaaaagtaaacaaagcaaagtaaaagtaaaagctgagatgataattgtgagtagacccgggggccgtagtgttcacgagtggcttctctcatgaaggcaaatagacgtagggtaaacaaattactgtcgagcaattgatagaaccgtgcaaagtcatgacgttatctacgcaatgatcatcatataggcatcacgtccaaaacaagtagaccgatactttctgcatctactactattactccacacatcgaccgctatccagcatgcatctagtgtattgggttcaaaagaacagagtaacgctttaagcaagagacatgatgtagatgaacaaccccatatctacgacgaagctcatcttgttacccttgatggcaacaacacgatgcgtgccttgctgtcccttctgtcactgggaaaggtcaccgcaacggtatgaacccaacaccaagcacttctcccattgcaagaatcatagatctagttggccagaaaagaaccaagattcggagagacttacaaggatatcaaatcatgcatataagaaatcagcaaagactcaaatataattcatagataatctgatcataaatccacaattcatcggatctcgacaaacacaccgccaaagaagattacatcggatagatctccatgaatatcatggagaactttgtattgaagatccaagagagaaaagaagccatctagctactaactacggacccgtaggtctgaagtagactactcacgagtcattggagaggcaatggtgttgatgtagaagccctccagctccaaagttccctccggcagggcacagggagggatctccagatgagatctcgcggaaaacggcggcttgcggcggcggaaaagtggtttcgtggatgccctgattttttacaggattttagggaatatataggacgaagatctaggtcagagggccaccaagggggccacaagcttggccggcgcggcctcccccctggccgcgcggggcaggcttgtggggcccctggggcacctcttgcttggccctcaagtcctccgatcttttctggtccgggaaaaaatcattccggggattttattccgtttggactccgttccaaaatcagatctgaaaagggtcaaaaacactaaaaaaacaggaactggcacttggcactgaattaataagttagtccccaaaaagatataaaaggtatataaaacatccaaagttgacaagataacagcatgaaaccatcaaaaattatagatacgtttgagacgtatcagtgtttcaccacaagactcgcccgggcggttctcttgagcgctacaaggctagatgggtggttcgcggttttcggcaacgcgcgggcgtggacttcaccgacacttttgccccggttgtgaaaccgggcactatctgcactgttcttcagctggccgtttcgcgcgcctggcctgtgcatcagttagatttttccaacgccttcttgcacggtcatctcgccgagcaggtgttctgtgagcagcctattggtttcgtcgacgccgagcacgccgactccgtgtgcttgctctcccgctctctctatgggttgaagcaggcaccccaggcttggtaccagcgtatcgcagcctttctgcagtccctgggatttcggtccactcgctccaatgctttactctttgtgtatcatcagggcactgccactgcatatttgctggtctacgtcgatgacatcatcctcacggcatccgcccccgatctccttcagcggttgactgctcgttttcgcgatgagttcgacctaaagcacttggggctctgcactactttctcggcatcgaggtgatccgcagggccgacggtttctttctgcattagcagaagtacgcccacgagcttctcgagcgtgccggtatgcttaactgcaagacggcacccactcccgtcgacacgaaggcgaaggtctctgctctggaggggtctcttgcgcccaatggagcgttttatcgcgaaaatcgtcggtgctttacagtatttgacactgactcgccccgacctccagtatgctgttcagcaggtgtgccttcacatgcacgtcccgtgtgactctcacttgaccctggtgaagcgtattctccattatatacgcggcaccatgttcttgggactcaccctgacagcctccgcctccatcgacctcgcggccaactcggatgccgattgggctggttgccctgacacgcggcgctctacgtcaggctactgcgtctaccttgggccctcgttgatctcctggtcatcgaagcggcagcccacggtgtcccgctccagcgccgaggcagagtatcgcgtcgtggctaatgccgtggccgaatgctcttggatacgtcagctactccaggagttgctttgtgatgttcacaaggccactctcgtctactgcgacaacgtcagcgcggtctacctctccgccaacccggtgcaccatcgacggacgaagcatattgagctcgatattcacttcgtgcgcgagcaggttgcccttggtcgtgttcgggttctccacgtgccgacgacgcaacagtttgcagatgtaatgactaagggattgcctactcccgtcttcgaggagtttcggtccagtctctgtgtctccagcgacgcttcggggggggggggggggggggggggttgaatatgtatttgtgtcgcacgtgtattggagttgtggcccacctcctagtcttgtatagttgaggtagaggccttcccttgtattatatatacgtgcaccagcacccctaatcaatacatcgtattgcaaatcatctctctacaccattagctattattactatagcaagtattctagctaataagcatcagacaaaagcaaagcaccaatggtatgctttgctcagttccattggtcttggactcacagaagatcgcagtttgaaacagatgaaaaatatattattattcagctactatgatctaccttcgcatctgaaaccttgtttgttacatcttagcatcttcccagaagatcaagagattaaaagagatagactgatatggagatggatatgcgaaggtcttgtttacagtgataaacaagaaactagcttatatgagctcggtgatagctacttcaatgagctagtaaatagaagtatgatccagcccataggcattgatgatgatgaaaaggtaaatgcttgccgtgttacccgtgtacatgacatggtgcttgacctcatatgctcattgtcaagtgaagagaactttgtcacaatattagatgacaccagaagaaaaatgcctaactcggagataaaggttcgcagattgtccattcaaaatagcaagatagatgtgggtaccactaggatggagcatgtgagatctgttactgtcttctcagataatgttgttggagaagtgttggatatttcaagatttcaagttctgcgcgtgttggatttagaaggttgtgatgtctcaaatgttgggtatgtggggaacctattacatttgaggtatttggggctacaagatactcctgttaaggaccttcccatggaaatagggaagctgcagtttttgcttaccctggacttaagagctactgcgataaaagtactgccgtcgagtgttgttcagctaagacgtctaatgtgcctgtatgttcatgatgatatgaagttgccatctgcaataggtaacctgacttccctagaagtgctagataagctggggttatctgacgcggaccttgattttgtgaaagaattgggccatctgaccaagctcagggtgctccggcttgagtcctatggtttcgatgagagcctgtgtaaagctttggaggaatccattagtcatatgtacaaactggagattctagatgtatatttttatcgtggattcatcaattgcctgagcgaaggttgggtgcctcctccacaactccgcagattggttttccagtcagatgaacgtgcgttcgagacattgccgtcgtggattaatccttcatcccttcctctcctctcctatctggatataacggtgtttgaagtgcgatcggagaccatccaacttcttggcactctgcccgctcttgtttttcttgagataagggattattcgttgtaccgggaaggacatgaggtggaagtgcccgttctttccactggtgcgttattcccatgtgcgttattctgtgtacaagaacgcacatgaggtcgaagtgcccgttctttcctctggtacgttatttccacgtgcgatagagtgccgcttctagggtattggtgccgtgccgtctatgtttccacaaggagctgcgccaagtcttgaagtcctttggttcgccttcccagccaagtgggtctcccgtgaaagctttgatttgggcatgcggcacctcccttccctggagcgagtcgtggttgaagttatcaagaagggagctagcagtcaggaggtggataaagcgaaggctgcagtgagggcctaagtcgatggatggaggtgtgtattttttttacaaatgtatttgacaaaaaaaaaagacattcaaacagggcctaagcggtttaagcattacacagatgtatctaactgaagtctgtttaatttgcgcaagagaatgtggggcccgagaatgagcatcagtgagtgtcttctttgcaagtgccattttcttcctggaaacacgaggaattgatcttaccacaacaaccatatatacatggaatggaattggtattattgatacgtggcgtggtgcctaatttgattaatcccacagacaggaggtgtcagtctttctggctaatgtaaattgttgaatatatatttgtgcatgtatattgtgttattggatcctcctcctagtcccttgtatagttgaggtcgttcgttgatccgatggttttttttttcatcaacagaattatgcgcatgaaatgcttgagcgcgctggtatgctcaactgtcattctgttgctactcctattgatacgaaggccaaggtttctgctcaggggggttcggtggcgtcagatgctccattctatcgctccattgttggtgatcttcagtatctgacgctcatcggaccagacttgcagtatgatgtgcagcaggtgtgccttcatatgcacgctcctcatgactcccactaaactctcgtgaaacggattctccggtataaccgtggcacgatgtacctcggactcacactcacggcgtctccctttttggatctggtggcctattctgatgcctattgggccggctgtcccgacacacgacgctccacatccggctactgcgtctacctcggtccttcactcatttcattgtcgtccaagcgacaaccaactgtttcgcgctccagcgcagaggctgagtatcgagcagttgctaatgccattgccgagtgttcctagcttcgatagcttctccaggagttgcatcgcggtgtcaccaaggccacagttttctactgcgacaatgtttttgctgtgtatctttctggcaacctcgttcatcatcgccggacgaagcacatcgagcttgatatccattttgtgcgcgaacaggtcgcccttggtcacattcgggtacttcatgttccgaccgcacaacaattcaccgatgtgatgactaagagactgcgtactttcacctttgaggagtttcgttccagtctctgtgtctctggcgacacttcgactgcggggggtgttgaatatatatttgtgcatgtatattgtgttattggaccctcctcctagtctcttgtatagttgaggtagaggcccatcttgtacctatatatacatgcctactgcatccaatcaatattgagcattgcacagccgaaatctaatattctacagaaactaagcatctgctcagaggcatactccctctattcttaaatataagtcattttaaaaatttcattaggaaactacatataaaacaaaatgggtgaatctatactctaagttatgtctatacacagttttctagtgaaacatcttaaaaatattacatttaagaaccaaggaagtagatcacatagtcgcaagcgccaaagaaacgggcgggagtttaaatattagaggagtggatcagttatttactagagttgctcacacatacaaatggtctcgatgagggagcaagcgaggaatctcttcagacatttttcttaggcaccacagcacgcgagtaaagtgcgcgcatggagacagatgacgcgcggtttaatttaacctgatcactgcagtcgaagcggcttccaagggcaacttttcgcccatctcaagatctcatcgaccttatctatcagctactagtactaccacttactccagattcaagtttgcatctgagccttgtgagattaacacgtatctactactaccacaaccgctgatacatgggacccagctgtccacaggcccgcatggcagccaccctatgcacattatcgtcctacccaatagcggatcatcattaaattagtacgtatgaatttatactcctcaacgctggtttctatgccttattacctactccctccgtcccggtgtataagtcatcttacgaaaaccaaataatcccaaaacacttaggcgcagtgcattaactttcacctcgtttcttgtttttttgacatgaataaaggaatcaaccaataagagacgtggtgcatgtatgtttttaatgacttgagactaactagcacaacatgcattggtcaattcattgtatgtaatggtattaattactaaataagcattgatttctctcgttttcctctccgtcttggtcacggtgcacaacctaagatgacttatacaccgagacggagggagtactaagtttctcccctaggacacgatcattgcccagagtgccttcggagcaacaccgtagccttccacctctcttacaccaaacatattacgagagaggttgaggcatggagatcgccatgggggctattggccctctcctcccgaagctcggtgagctgctcatcggcgagttcaccatggagaaacaagtgagaaagggcattgaatctctcgtaacagagctgaaattgatgcatgctgtcctcggcaaggtgtcgaaagtgcccgcggaccagcttgacgagggggtcaagatctgggcaggaaatgtcaaggagttgtcctaccaaatggaggacatcgttgatgccttcatggtgcgtgtggggggtgatggcgagtccactaacccgaagaatagagtcaagaagatactcaagaaggtcaaaagattattcaagcatggcaaggatctccgtagcatttccggtgctttggaagaagtggttggtcaagcaaagcagctggctgagcaacgtcaaaggtacgaactcgtacatgacaccggggttggttctagtattgatcctcgtgtgatggctctatacaaagatgtgacagagctcgttggcattgaagatacccgagatgagttgatcaacatgttgactggtggtgatgaatggttgaatgatcccctcaagacaatctccattgttggatttggcgggttgggcaagacaactcttgcaaaagcagcatatgacaagatcaaagtgcattttaattgtgatgcatttgtttcggtttctcagaatccggacgtaaagaaagttttcaagaatattctctatgaacttgacaagaacaagtatgcacacattcatagcaaagactgggaagaaagacatctcattgatgagctcgtgaaattccttaatggcaagaggtatatatgtttttttcctcttacaacttgatgaccatttagtaaaatcatgagacttttggcatagtatatatgtattcacacatcatatcattgatccactatatatagttttctactgttcatataaattggtcaagttttctctgctgaattttcacttggatgtcatataataattgttatgaagatctaaaggtttttcttccttggttgaaagatggttcaccaaattactggctagcctgttggggtttactttctggatgctttgtgttggattttctagcacaacggtccttttctggttaatttattacatacttctaatatacgatgttacattgggatattttttgttacatacgtaattttttcctgtgattgttgtttgatttcttttccctgttttggatgcttgcagtataagtttaaaattgaaagggagatgtcgtaaagcaaaacttgattgatttttattagaatattctttgtgcatttgaaatgtatcggacaagcacttagtttgaaaaattaaatacttaactcgcacatttccaatactagattttatataatgttgatatatttggcacaaatgttttccctgtgacagttgtttcagggttttccctaatatgagtacttgagaaggtgaaatacacgtcaaaattatacataatgccaaaatgaaactttgttgaaatttactttagtatgcttatccttttaagatagttggagtgtgcatacataccttagcctgcccatagtaaaaatacttaggcataacttgacccgtgcaatcaatctaatcagaaacagactagatgcatgcacatattcaccacgtccaagctaaggcaaaaaaggtatattgtttggttttatgcacataatgacgggtagattgagcacacaatgaaaaaaaatggaagaccacaagccttataaaaacttgaaataacttggataatataatttgccttaacatggcaacttctggaaatcttgtattgtgcttttatatattattttacatatcttcattgtactgatcagttgactaattattaaatttactcacaaaggtacctcatcgtaattgatgatatatggagtggagaagcatgggagttaattcagtgtgctttttccaagaagagtcccgggagccgactaattacaacaacccgcatttagacctgttgatccatttctctgatatccctcagacctcaacttcgtccaacatgtccctgggaccatgtcgagtgaaggaccatagggcagcgtctctgtgcgtacacgtgacggcctctgctctcgatgattatttctaccgcgtttgcagacggatagagtcagtcatcactcatcactcatcagagagagagaggtcgagccatggagtggatctcgcgacgggtgctccgtcggccgccagccctggcctcaggcaaaaaaccgttgaagaaacaaagaaaaaaaacaaaaagatcatagaaaccacagcgaacgcacccaccatcaagctcctcaattgaaaaaacggatcaaatggaaaaacctcgatcatttaccccccctcccctcccctcccgcgatctacgcggccggaccgcgcccccagcttcccgcctcctcacccccttccctcctccctctcgccatcgccggtgtgccacgccggcccttggtcgggcggccccggtggtggcgggcctccggcccttcccctcctggctcgggtggcgcggggcagcctggggcctggtggtgctccttggcggcagcggcggggcttcccctggtgcggcgtgggtggccttggtggcggtggtgctgcagttggtgactgggcagcagtggtggcgctccgaccctacaagcccagatctaggcccctaggacctgatctgggtcacgtcgggcctgtcttgttgcctccggttagcctacagcggggatgacagcgttgacgttgcactgctacagcatggcgatgggagcttcacgggattttccatgcccggctgagcttttgggctgcatgagggtagcggcggtggcggcctacgtgcagcagcatggcgccggggactttacgagccccggggcttggccggggctcgaccgggcctagttggcctggtgtgtcccggctgctgtgtccggtcgtcctccgggtggctgcgctgcaggaggacgtcctccgggtggatgcgctgctgccgcccactacaataaatatgtcaacttgtgaccttctcttagtgaccccagctgaatcggtcgtaaatacacggccatttcgataggaagggctcaaaccctgaaattgcctcacaccaaatggtcataaagcagacaacaattgtcaacgaccttatttatacctaattacgaccaatataaatgatcatgaggttgtgaacatggatgcattggtacttaaggccacctcctttttatatgtatacaaaaaatgtactatgtgtaaaaccaaatatagacatcaaaacgtatgtatgaatgttgaaaatatgccctagaggcaataataaattagttattattatatttccttgttcatgataatcatttattatccgtgcaccgtgctataattgtattgattggaaactcaaatacatgtgtgggtacatagacaaaacactatccctagtaagcctctagttgactagctcgttgatcaaagatggttaaggtttcctgaccatggacaaggtgttgtcacttgataacaggatcacatcattaggggaattatgtgatggacaagagcaaactatgaacgtagcatatgatcgtgtaagtttactgctacagttttatgcatgtcaatgtatctattcctatgaccatgagatcatgcaactcccggacatcggaggaatactttctgtgtatcaaacgtcacaacgttactgaatgactataaaggtgcactacaggtatctccaaagatgtctgttgtgttggcatggatcaagactgggatttgtcactccgtatgacggagaggtatctcggggcccactcggtaatacaacatcacaaacaagccttgcaagcaatgtgactaaagagttagacacgagatcttgtattacggaacgagtaaagatactttccggtaacgagattgaaataaggtattggataccgacaatcgaatctcgggcaagtaacataccgaaggacaaagggaatggtatacgggattatatgaatccttggcatagaggttcaaccgataagattatcgtagaatatgtaggatacaatatggacatccaggtcccgctattggatattgaccgagaggtatctcgggtcatgtctacatagttcttgaacccgcatggtctgcacacttaaggttcgatgacgtttcggtatagttgagttataggtgctggtaaccgaagttttgttcggagtctcggatgagatccaggacgtcacgaggagttccggaatggtccgaaaatgaagattgatatataggaagtcctgttttggtcaccaaaaaagtttcgggctcatcgatcggtagtgtaccgagagtgccgggaggggtgccggggaccactaggaggggtgtcatgccccaagggggctcatgggctatgggaagagataaactagcccctagtgggccggaataagttcccactaaggcccatgaggtttgagaggcaaaaacccagaggtggaagaggtggaaagggtttccaagtggaaaggaggaatcctactcctagtaggattggagtaggactcctccacctccaatttcggccaaaccttgagggcttgaggctgcgtcctcccctcccttcctcctatatatagtggtgttttagggctgatttgagacaacttttgccacgtgcaaatcagatctagacacctctacttctccgtttctcgtctagatcgcgtttctgtggagcttaggcgaagccctgcaggaatagcaacaccaccaccaccggagcgccgttaggctgccggtgaacttatcttcctccccgtccctcttgctggatcaagaaggcggagatcgtcatcgagctgtacgtgtgctgagcgcgaaggtgccgtccattcggtacttgatcgggatggatcgcaaaggcggttcgtgggacggatcgcggggctgttcgtgggacggaaatttggatctcatgagcgtaccactacatcatccgcgtttattaatgcttcccgctgagcgatctacaagggtatgtagatctaatctccctctcgtagatgatcatcaccatgataggtcttcatttgcgtaggaaattttttgtttcccatgcaacgttccccaacagtggcatcatgagctaggttcatgcgtagatgattttctcgagtagaacacaaaggggttgtgagcgttgatgttttaagttgctgccctcctttgctttatctcgattcagcggcattgttgaatcgaagcggcccagaccgacattactcgtaaccacgagagactggtttcaccgttaacatgcaatgagattgcatcaaggtgactggtgggtgcctgtttcttcaactttagttgaatcgaattagaacgaggcggaccttggagaaggtgaaatagcaacttactcatcaccgttgtggtttttgcgtaagtaagatgtgatcatactagatacccatagcagccacgtaaaacaagcaacaacaaattaaagggcgtctaacttgtttttgcagggtatgcttgtgatgtgatatggccaacaacatgatgtgatatattggatgtatgagatgtgtcatgttgtaatagttaatatctacttgcacgtcgatgctacggcaacccgcaggagccatagggttgtctttaaactcacgtttgtgcttgcacatgcgtttactatattgctaggtggtagctttagtagtaatagcatagatagcacgacaaccacgatggcgacacaatggtggagatcatgatgatggagatcatggtatggcgccggtgacgatggagatcatgccggtgcctcagtgatggagatcgagaagcacggagttcatggccatatcatgtcacttatgatttgcatgtgatgttattccttttatgcaccttatttttcttagaacgggcgtagcattataaggtgatctctcactaaaatttcaagataaaattgtgttctccccgactgtgcaccgttgctacagttcgtcgttttgagacaccacgtgatgatcgggtgtgatagactcaacgttcacatacaacgggtgcaaaacagttgcacacgcggaacactcgggttaaacttgacgagcctagcatgtacagacatggcctcgaaacacaggtgaccgaaaggtcgagcgtgaatcatatagttgatatgatcaacatgtagatgttcaccattgtagctaaactcaacaaacgtgatgatcggacttgagctagtgaatttggatcatgcaccactcaaatgactatagagatgtatattttgagtgggggttattagtaatatgattagctaaactcaatttttcatgaacatagtcaaaaggtcttcacaaattatgtcgtagcatgcgctatatctctactgtttaagatatgttcctagagaaaatttggttgaaagatgatagtagcaattatgcggacttggtccgtgaactgaggattgtcctcattgctgcatagaaggcttatgtccttaatgcaccgatcagtgtgctaaaccccaaacatcatctgtagatgttgcgaacatccaacatacacgattttgatgactacatgatagttcagtgcgtaatgcttaaaacggcttagaagtaaggcccgccagacgttatgaacatcgcgagacatataagatgtttcaagagatgaaattaagatttcatgcttgtgcccgtgttgatggatacaaaaccttcgacatgattctttgcatacaaagtaagggagaaaaactcaatcgttgagcatgtgctcagattgtctgagtgctacaatcgcttgaatcgagtgggagttaatcttccagatgagatagtgatggttctccaaagtcactgtcaccaagctgctagagcttcgtgatgaactataatatatcaaggatagatatgattatccttgagcaattcacgatgtttgacatcgcgaaagtagagatcaaattggagcatcaagtgttgatggctcgtagaaccactggtttcgaaaagggcaagggcaagaagggatacttcatgaaacggcaaactagttgcttctctagtgaagaaacccaaggttgaacccaaacccgagactaagtgcttatgttatgaagggaacggtcactgaagcggaactaccctagttacttggtagatgagaaggctggcaaagtcgacaaaaggtatattggatatacatgatattgatgtgtactttactagtactcctagtagcacgagggtattagataccggttcaggttgctaagtgttagtaactcgaaataaaagctgcggaataaacggatactatctaaaggagagatgacgatgtgttggaagcgtttccaaggttgagatgatcgacatcacacgctccctctaccatcgggattagtgttgaacctaaatgttatttggcgtttgcgttgaacatgaatatgattggatcatgtttattgcaatacggttattcatttaagtcagagaataaaaggttattctgtttagatgaataataccttcattggtcatgcactgctgctggctacgcctatagggatttccttggcaagtatgcaaaggattcccccgcggccttgaagccttgcgttggtgttcccttgaagaggaaagggtgatgtagcacagcggcggtaagtatttccctcagtttgagaaccaaggtatcaatccagtaggaggatcacgccaagtcacaagtacctgcacaaacacaaagagcttgcacccaacgctatgaaggggttgtcaatcccttatagattgtttgcaaagtgagaattgaaagcaaaaagtaaacaaagcaaagtaaaagtaaaagctgagatgataattgtgagtagacccaggggccgtagtgttcactagaggcttctctcatgaaagcaagtaaacggagggtgaacaaattactgtcgagcaattgatagaaccgcgcaaagtcatgacgttatctatggcaatgatcatacatataggcatcacgtccaaaacaagtagaccgatactttctgcatctactactattactccacacgtcgaccgctatccagcatgcatctagtgtattgagttcatgagagcagagtaacgctttaagcaagatgacatgatgtagatgaacaacctcataatgatgacgaagtccatctttttacccttgatggcaacaacacgatgcgtgcattgctgccccttctgtcactggaaaaggtcaccgcacggtatgaaccaaaaaccaagcacttctcccattgcaagaatcatagatctagttggccaaacaaaacccaagactcggagagacttacaaggatatcaaatcatgcatataagaaatcagcaaagactcaaatagaattcatagataatctgatcataaatccacaattcatcggatctcaacaaacacaccgccaaagaggattacatcggatagatctccatgaagatcatggagattttgtattgaagatccaagagagagaagaagccatctagctactaactacgaacccgtaggtctcaagtagactactcacgagtcattggagaggtaatggtgttgatgtagaagtcctccagctccaaagtcccctctggcaaggcaccgggaagggtctccagatgagatctcgtggaaaacggaagcttgcggcggcggaaaagtggtttcgtggacgccctgatttttttcaagattttagggaatatataggccgaagggctagggcagacgggcgccagggaggccacaagcccccttgccgcggcctcccccctggccgcgccgtcagggcttgtgggccccctgtggcgcctcttgcttggccctcaagtcccccgatcttcttctgttcgggaaaaaatcatttcgaggattttattccgtttggactccgttccaaaatcagatctgaaaagggtcaaaaacacagaaaaaataggaactggcacttggcactgaattaataagttagtccccaaaaagatataaaaggtatataaaacatccaaagttgacaagataacggcatgaaaccatcaaaaattatagatacgtttgagacgtatcatgcaccgatgtgaatggttcgttgaatctcgatcgtagtaatacacatgttcataatattgatgccaaaagatacaaagtagtaatgatagtaccacttgcttgtggcactgacacttgagtcacattggtgtaaaacgcatgacgaagctccatactgatggatcttgaagactcactcgtttttgaatcgtttgaggcatgcgaaccatgcctattggtgtaatcgcatgaagaaactccatgcagatggattgttcggactcacttgattttgaatcacgtgaaacatgcaaatcatgccacatgggtaagatgactgaaggtctcgttttcgttgagatggaaaagagatagtgacttattggaagtaatacattttgatgtatgcagtccaatgagtgcttaggcacgaagtgtatatcattatgttcttacttcacagatgatttgagtaaatactagtatatttacttgatgaaacacaagtctgaattattgaaaggttcaagtaatttcagagtgaaattaaagatcattgtgacaagaggatgaaatgtctacgatatgatcgtagaatgattgtctgagttgcgagtttggtacacaatttaagacaatgcgaaaattgtttcacaactaatgccacgtggaacaccatagtgcgatggtgtgtccgaacgtcatagccgtgcactattggatatggtgcatactgtgatgtctcttatcgaattaccactgtaatttttggggttatgcattacagacaaccacattcactttaaatagggcaccaagtatttccattgagatgacaccgtataaactgtggtttggagaaacctaaggtgtcgtttcttaaaagtttggggctgcgacgcttatgtgaaaaagtttctgtctgataagctcgaacccaaagcggataaatgcatcttcatagagtacccaaaacagttgggtatacctcatatctcagatccggaagcaaagtgtttgtttctagaaacaggtcctttctcgagaaaggctttctctcgaaagaattgagtgggaggatggtggaaacttgatgaggttattgaaccgtcgcttcaaccagtgtgtagcagggcgcaggaagttgttcctgtggtgcctacactaattgaagtggaagctgatgatagtgatcatgaagcttcagatcaagtcactacaaacctagtaggtcgacaaggtcacgtactgctccaaagtggtatggtaaccctgtcttggaggtcatgttgttgaacaacaatgaacctacgagctatggagaagcgatggtgggcctggattccgactaatggctagaggccatgaaatccgagaaaggattcatgtatgaaaacaaagtggtgactttggaagaactacttgattgtcatgagactgttaagtgcatgtggatttttataaggaagacagacaatgatggtgacaatcactatttagaaagctcgacttgttgcaaataagtttgcgacaagttcaaggagttgactatgatgagactttctcactcatagcgatgctaaaagtctgtcggaattatgttagcagttgctgcatcttgcagatggatgtcaaaacattttttccacaacggtttccttgaggaaaggttgtatgtgatacaaccggaagattttttgtcgatcctaaggatgctaacaagtatgcgagctccagcgatccttccaaggactggagtaagcatctcggagttggaaaaagcactttgatgagatgatcaaatatttttggtttatacgaagttgatgagaaacttgtatttccaagtaagtgagtgggagcactatagtatttctgattagtatatgtggttgacatattgttgatcggaaataatgtagaatttctgaaaagcatatagggttgtttgaaaggagtttttcaaaggaaaacctggattaagctacttgaacatttagcatcaagatctatagagctagatcaagacgctggataaaactttcaatgaaatgcatgccttgacaagtttttgaaggagttcaaaatagatcggcaaagaaggagttcttagctgtgttgtaaggtgtgaattttagtaagactcaaagcccgaccacggcagaagaaagagaaaggacgaaggtcgtcccctatgcttaagccgtaggctctatagtatgttatgttgtgtaccgcacctgatgtgtgccttgccatgaaactgtcaaggggtacgaaagtgatccacgataggagtactggacaatggtcaaaagttatccttagtaactagtggactaaggaattttttctcgattatggaggtgataaaagtgttcgccgtaaagggttatgtcgatgcaagctttgacactaatccggataactttgagtagtaaaccggaatcgtatagtagagtagtcaattggaaaagttccaaatggcatgtaatagcaacgtctgcaggataccatagagatttgtaaagcacacacggatctgaagagttcagactcgttgactaaaacctctctcgcaagcaagacgtgatcgaaccccacaactgtatgggtgttatattcgttgaaatcacatagtgatgtgaactagattattgactctagtgcaagtgggagactattggaaatatgccctagatgcaataataaattagttattattatatttccttgttcatgataatcgtttattatccgtgctataattgtattgattggaaactcaaatacatgtgtgggtacatagacaaaacactatccctagtaagcctctagttgactagctcgttgatcaaagatgttaaggtttcctgaccatggacaaggtgttgtcacttgataacgggatcacatcattagaggaatgatgtgatggacaagaccaaactatgaacgtggcatatgatcgtgtaagtttactgctacagttttatgcatgtcaaggtatctattcctatgaccatgagatcatgcaactcccgaacatcggaggaatactttgtgtgtatcaaacgtcacaaagttactgggtgactataaaggtgcactacaggtatctccaaagatgtctgttgtgttggcatggatcaagactgggatttgtcactccgtgtgacggagaggtatctcggggcccactcggtaatacaacatcacaaacaagccttgcaagcaatgtgactaaagagttagacacaagatcttgtattacggaacgagtaaagagactttccggtaacgagattgaaataaggtattggataccgatgatcgaatctcgggcaagtaacataccgaaggacaaagggaatggtatacgggattatatgaatccttggcatagaggttcaaccgataagattatcatagaatatgtaggatccaatatggacatccaggtcccgctattggatattgaccgagaggtatctcgggtcatgtctacatagttctcgaacccgcatggtctgcacacttaaggttcggtgacgtttcggtatagttgagttataggtgctggtaaccgaagttttgttcggagtcccggatgagatccaggacgtcccgaggagtcccagaatggtccggaaacgaagattgatatataggaagtcttgttttggtcaccggaaaactttcgggctcatcgattggtagtgtaccgagagtgccgggaggggtgccggggaccactgggaggggtgtcatgccccaagggggctcatgggctgtgggaggagataaacctgcccctagtgggctggaataagttcccactaaggcccatgaggtttgagaggcaaaaacccaaaggtggaagaggtgaaaagggtttccaagtggaaaggaggaatcctactcctagtaggattggagtaggactcctccacctccaatttctgccaaaccttgagggtttgaggctgcctcctcccctcccttcctcctatatatagtgatgttttagggctgatttgagacaacttttgccacgtgcaaatcagatctagacacctctacttctccgtttctcgtctagatcgcgtttctgcggagtttaggcgaagccctgcaggaatagcaacaccaccaccaccggagcgccgttagactgccggtgaactcatcttcctccccgtccctcttgctagatcaagaaggcggagatcgtcatcgagctgtacgtgtgctgaacgcggaggtgccgttcgttcggtacttgatcgggatggatcgcaaaggcggttcgtgggacggatcgcggggctgttcatgggacggatcgcggggctgttcgtgggacagagatttggatctcacgagcgtaccactacatcatccgcgtttattaacgcttcccgctgagcgatctacaagggtatgtagatctaatctccctctcgtagatgatcatcaccatgataggtcttcgtgtgcataggaaattttttgtttcccatgcaacgttccccaacaatgaaaaggtgttttttattgagaatatatgaaaagatgttaatcatttattagaaaaatgttagacatatataaacattccatgtgagctcacaatccaatctttgtttttcgtaatattttcagtctgtgaagcagctatattttatattgcttttataatttctgaaaaattactaggatatgaccgtgcccacagaacctccccccaccaaattttagctcatttaatttatccaatttccctcaatattttccctaattttctgttcagtggacagcattgtgaaggaaatatcatttttatttatccaaatggtattaaaattttagagtgcgttcatatccccaaattatcatccttctccaaattgtagctcaattcaatcatctatgtgagcccagtatcaatttctatcttttgtccagattggcacattgcaaagcaagtgctatctagacccctcctatttctctcaaacttttttggctctcgtccacattcaaatcattgccacatgccaatattcagctccattttcctagtaaatcttcatcagtaaatttccaaagtttctatccacagagaatctttgtgaagaaagtactggctaggattatctaaattatctgagggttttccaaatgtttcacatactcaaatgatcactctatacaaaatttgagatttatccagcaaaccatgtaagctcatcatccaatcttttattctcgtcatattttcagtttgtaaaccaactatattttatattgcttaattatttctgaaactttaccagggcatgtttctacctatataacttgcctccaccaaatttgagcttatttcatttagccaatttctctcaataattttcccaagtttctgtctaaagaagagcattgtgaaggaagtatcactttggcatgccaaatggtaccaaatttttactgtgccttcctcttcccggatgactatcctccaccaaattgcagctcaataaattcattaatttgagctcacaatccaatctttgtttcaactaatattttcaatttgtgaagcaactatattttatatttctttataatttttgaaaatttaccaggacatgaacctacccatataacctccctacaccaaattttatttgattttaatgtagccaattttcctcaatatattcccaattttctgtttagctgagagcattgtgaaggaaataccatttttatttatccaaatgatatgaaattggtacagttacttcatatgcccagattatcatcctcatccaaattgcagctcaatccaatcatctatatgagcccagcttcaatttctattttttgtccagattggcacattgcaaagcaagtgctacatagacccctcctattgccctcaaactttttgggctcatttcattttgccaattcctctcaataattttccaaagtttctgtccatagaagagaattgtgaaggaagtgtcactttggcatgtccaaatggtatcaaaattttcagtgctttcctatgcccaaatgaacatcatccaccaaattttaactcaatccattcattcatttgagcccagcatgaacatccatatttctgcccactgtggtacttcgcaaagcaagtgccacctaggctcctccatttgagctaaatatttgccaagatagtctccttagtagatgatcatcctcggccaaaattcaggcccattgcccatgtgcatttcccccacctctaatcaaacacttggttgctaattcatgtttgagcttacttcagtctcctcgtgagattcttatattgtattcttcttcctaacacctaccgagggagtgtccaacccatgagacatgcctaggctgcctagaatgcgtggcaacgcaacagtgacgcggtgaccacgcgactggcatgccagtttacgcactccggagttggggcccacgcccaccatccaaaccttgacgcctcgccaccacaccatatatttctgattaaaaagatacttatgtacctagaaatgatttttggaaaaaaaataaagagcaaactatgaggtagctgcagatcaaatttgacccacttccaactaaatcgacgaaaatttgtctttttcacgagaggtggatcaaaacttttgacacgcaaaaacgccgacgcaacaaggccggtgccgagctgtgcttggttgctgccttgattcgtcagggaagtagatgggacaggggaagggagaaagggcattgatcaagggaggaatgggcaagatctaggagatgcacgtgggctggggtcaacacacgagttggagaattatacggttgagcgcatccttcatatgtggggataaggatgaggaggggaggagcggtgcaaggggccaccacaacgcgtggcaatagttggaggtggctgacgcctatcgagtaatcatccgatagatttaaagacttctccataataaattaggtgattagtcatctcgtcctatttctgtggttgtgtctctttaactttttatttgcttttattttagctcagattgagcttgtactgatcctcggatatttttggatatttggcttaatatgtatgtctacatgcatcatgctcacgcagaggtgaggggttatccttcttttccaaaaaaaaagtttttatgcggtctgctcttcggtagcaactagatcgagagagctacttttgtgtgagtgcggagattttagagtttctttttacggacaaagattttagatggagttgcaatcagaaatatgcagtgcccaagcttctctagtagtaagaaaatgatcctctagtgatagcgaaatcacgcacgatgagacgaggagatctatcagacctcaactaagttgttgtttgtttcggaaaaagaaaatctctatgacttgtttacggtgtaatcggaagatattgcacgcgtttgtttgatgtacgttataatcctctgccccataaatgaatacaatatatctttcgatcaataccacccacaccccttcgtaaacggttttcttactgcaacttctcctctcatgatccgctccttctcctcctcgaccagcaccgtcgcctcccgaaagaactgaacaccgccgcattcgagctggctcctcccgtctctgatggccagcgagtaactggatgtgctccttctcttcttttcgggctttctggtagccattgccgccgcccctggtcactactccgttagcttctgcccaagctcgcccttatcgtcggaccgctcattgaaaggcacatgtttccccccttgttgcttttcttctttttcagccactggccgttacaacttcgaagatggcaccctaactcaattcctttacaggcaagaaccaaacaaaacagcgattatccattacatttccgttaacagagtgatctatttcattaccatttatgttaccattctctaatccaaacaccttctaagaccttgcttgaaatggatgtaaggttttacacctgtatttatcttatataagtataaactagcaaaaaagcccgtgcgttgcaacggaagagaaaataacacacgctttgaacgtaatatattttcacatggcatcacatttgtgttgccgacgatggcctcagtgctcgcacaacgaaaccgcgtttgaatgtacaatcactcggaataagatgagaaatatgttgtttctccccacgagatttttcaaaggtgtgcatgtatggttaacgatgttttctttcctctcaatttggttttaatttaatggatatttattgcaattcgtatggtcgtcggaaagagagaaaaaatggaccgtgcactacagattaagtttgcaccaaaaataatatttaagaagtattcaacaggtaaaaataacatcctatttagattctacacattttttcaatcaaatttcatatataacatgttagaatcggagttacggtttaaaagatatggataattttgttttagataaaatatggattgattaactaaaaagtcaggttttttttgttaaaacacaaaaaacgtttcggctgacttaaatagggacggcgggttgattacctgaaacatcagggatttttctgaaacaaatgcaaaaaacggttcggctgtgactaaaagatggaccgcggattgattatctaaaactgtgaggacttttatgcaaaatgacagaaaacggttcgttctgacttaaaattggactgtgggttaattacctgaaaatacgagggcttttctgcaaaatgatcgacgacggacgacagaaacattacgcgctttattatgactagcaaaagagcccgtgcgttgcaacgggagaagaaaatcttacatgtcctaatttgtatttccacttgaatggcacatattataactgaaatttgtttgcagatcaaaaaaagagcaatttgctttaataccaacttccactttgcacattttttcaatacattataggtttccatctttaactggagcaccagagtacattatagctttccatctttaactgaagcaccagagtgtacacaagcaagctttggtttgtatcccacataagaccttttttaacctacaaaaaagaaatctagtccgtatggatctcatccttttgcacatatatattgtatgaatgtcgttcaaagaaatagcatcatccatgcgaaaagactcaaactataatcaatttatcgcgtgatgaattaaatagtaagctctagatcataagaaaaataaaattggctctgttatgtaaactgtacctccgctctcttgatctgcacgcaattgttaagttactgttattgatacataactcgtgcaagatctgttcagtgaaatcagctattagttttctgtaaaaatctcattatagttgaggaactgagcaccaatatttatcatctactacagaccggcaaccaagaaaaatgaagagcttgaaattcaaatcatttgagtacctcgctggcaatcttgataagcttgtcatttgtgtgaattgcatcattatacctgtaatatcaagtggattatcttggccctcgcactgtctctccaatccactccaatccatgaatgatatatgtggttacgtgaattagatcgagacagtacaccgtgtggttgtcgtccccataagcagctagcgccatggcctttgagatcctttgccatggcctcatcttgccattcactcctggagtgcacggacgtggtggctccattggccgcccgtgctccgaatcagggcagcagcctcgccttcgacctgattcgaatgcccacaggctccgtggcctagaggtctggccgcaccgcccatcctcgctgcttcctctgctcactgctcgtgttaaccaacatttactgccaaacagaattagatgcatgagaagatagatgaaaagatagatgtttaattgaaatggaccaagttagctagctagctaaatgaaaagatatatgcatgagaagctagctccattgacaaacgaattaaataatgagagtggaggattttattgcttattgtttaacaaattaaactatgatcggtagcttaaataatgagaaactataaacagaatttcaccaagcaagctatgtaaatatggcaccaagcaggctgtcttgaaaatcacaatccactaagctcaactcatgactaagagtgtaagattgaaaataacaagagaaacatcatcatacactacagagcaacaattgagtgagatggttttcagagccaccagtccccctagcaaggcaagctcaaagacgaagccccatccggggaatgcgacgttgcaggccaccatcgcttgatccggaagacccgggatccaaagtttcctccggaccaaaacaggaaggaagacgaaactgcagcacgacgtttcaacctgtagccatggtgaggcatcgcagtcgttggcattgaccgaaaccgaagccccacatgacacacaaggtaagaagcacaaaccttgagagcggtctgcttgcgcaagatatcgttagacttcaacatgactgcagaaatccaaatcatcaggaagaaacctacacaatataaactttatttaaatgaggaactcgacatcattttctgaccagcgactctccgcagtatttgggtagagcacaacaaaatggatcgaatcaaactcgcatcacaaattcactcgtatagccagggataccctctctctaaatagagaagaaagaggtaggtgttgcacgcggattcgcgtaccttacaggtgctggctgatgaagacgccgagctggagcagggagaagggcaacgcgtgctccacccacctggccaggcgctgcacgtcgtagcccaggtacggcgagtccccctccccccgctcctgccgcccgcaccggcctcgtccccccgcgttgcgggtgcctcctcgtccgcgggctggacgggcgtctcgtgcgcgatttcaggcggacctccgccgccgcacttcgccgcccctcgcgccgccgcctccagcctcgccgccccgccgcatggtgcgttgcgtccgccgccagatccggcccggctcgtcatggatccggccgccccacgcgcccctcggcctcgcctccacctctgaccaccgccgtcgacggaccggcctcctcgtcagccagatcgggaccggactgtcccgatccaccccatccctggaccggtggaggacaggggtttttttgaaaaaacaaaacttttttttcacttaatggtggaccgcggattgatttttaaaaaacaggggacgtttttgcaaaaatgccacaacggaaattctgacagaagcaatagcttctttattattaggtaaagattaccggtcaacacttgattcctgcctggaatcaaaaagacgggacaagctctgtactgtattctctaccggtctgaaacaaggagaatgctaatccaaacgtggcctaagttgtttgtgttcgtcttagctggatgacacacgggaccataccgggcggaggatccacatggaagcagctctgtgccggcacttgaccggtcccgtaacaggccctctgctcccagcgtttatttctacagcgtttggaaagagtccgtcagtcagagtctcagagatagaggtcgagccgtggagtggatctcgcggcggcgacttccccagccgcccggccgggctcgtcccggggctggtgcgtcctgccggtcaccggcgacttactcgcccggagaggtgcctgcagtgcagggggcaaaggttggaatctcgcagaaaatgaggtatattttcttcttcctgatctggatccgattaaattagtttcttggactaagctcattggggcgtacatcttaagtgcatattagtttcttccgttctaggttgtttaatctagtttcttcaagtaccggccgaccggtgtgcgcatcttaatccctcagtgcaaatcctctgttatccatgttagatttgctcctagggtctgctctagtgaggccagataactagcacacgcttcagtactgacctctctttgtgataaacatacatcagatgcatcttttaatttgtttgccaactaaacggtgcaaaaacttcatcatatccatagctcagtgtgggatgaaaatcacaactgtttgtggacctaaaacagatgctagtgcagaagaaatgcagatgatattattctcttgggatctgctgtttcagtggactacctctccacattgtatcgttcggtcgtgtaactttggtgtggttgctttatatataaaaagcggagcgagagcctgtttcgagaatattgttgtttagctgttaccatcttgactgcaaatcgtctgtgattcaccctagatttacattgcttgccataagatgtttttgttcccaagggtccactcttttgtttttttgccttgataactagcacattattcacatcttctctttatgaataaagagtatactcatgttgacttgcctgccaactaatctgtttcaaaatcttcacatgcataggtacttgggcttgggatgggaatcacaattgttgtggagtaaatgaagaatatcttgttgtttggctgctaccatcgatgttcttgtagattgaacattgccatgggcgtttctctatgcaaccaatatattagatcaagcatcatgtcatggacatcataagacttttctgccttgatagtgatgtctacgggttggatcatgcttctgtttatgagctcattgaagtaactctcctagctcaaatgggtcaatttcacctttaaatgatacataaatcttcagctatccatcttcatatgaactggtctcgcttaattttgcaatcttctggatatatgcttacatgtaataaataatgtgaaggtagatcatagaacgacaacacaatctttacttttaaacacattatggtagactagagatagaaaacaataggaaccacacacataccaatgatatggaaagtagcaaagaaatagtaaaagaagatcttgacttttagattatgtcaaagtgataatctggagtcaagcttatttcaccactagttttgatctaccttgtcatctataggattagttattatatctaagtatgtttttacaagattagaagattaagcaaggttacttgatatgtaaatggatagccgaatgttttgtttatcatggaaaacaagagattagcctatttgagctcggtgatagagttactcaatgagatcataaatagaagcatgattcaaccaatagacatcaatttgatgaaggcatggaaaaatttatcgtgttcatgatatggtgattgatcccatatgtttttgccaagtgaagaaaaccacttacatggcaccgagtgaaagtggtctatacgaacttacaaaggcaatgtttgaagattatccttccaaaagagcatgtcagatatgaccaccatcagaagcagcaatgccacaagtgaggtaacttgcagtatctatatctgctattgttgatctagtgctgcttatgtcgagtacctgtgctggatttagaataatgtggtgtatgtttattctcatttgagactgttgaaaattggagaacactaaatttgtcttggcgttttgattcgtcttccctctacaaggtcattgtacccacatacctctgaattctgcaagtttctgcagcacctattgcatttttctcttaatgaacttcctttatttgtgttgtaaggagaagtatgtaatatgatgtactgttatcttgttaattcgcctttgaccttttgaatcttctttgacatgaagtactcattgtgattgtacccacttatgcctgcattatattatcacttctgctgattcaagaaacatgcagtttcagccgtgcctcctgtattatcacttatgccgattcatgaacttccttttccatttatttgttttgtaaagcataatatgtgatcttccttttccatttattcattattcaaggtagagtatgtaattatgattattgttgccttgtttgccagctttgattatccgttgcgtctctttcttcctagtagttttcagagttgttttactccagaattgtggaatgaaaatatggtcattcagtttatacaatcatttgaaatttcaccttttatctgtaggggttgctgtttgttttatttgtcgccttgcatgtgtcatgttggttcaaatttgactgaacaaatgttggagtgctaagattgaaaaaggaaacaagaaagacataccaggcaaccacaaataataaaattagaaggagtctaaaaacaaacgataatcttcgttaattactaatataatatcatattcaagtaaaaaaaatacatagactcctcttttccagaattataatccagtggccaactggattttgaatgcgcagcaacttcttaaaagtagaaatcatgcccacaagaccccatccggactgaccatgcttcaacctcaagtgaccagtttctgtgctacaggtacataataccacatgtgtcgccatgcatattcttgccatccaaagattaccatgaggggccaaattgtaagcaacattacctttggcatctccgatcttagcattactggcaatattcctactctaccacataccactatcatgaatttaacaatcttctcaactaatgatggcatgtagaggatttctaaggaaggaaacaccaccatgaccataatagcagttccagaaataactggggtgatcatgatgtatatagccaatacgaaggccgtccccaaagataagactccattgaaagataaccatatggatatattgtagtgcatgtagcgcatgggtatttcgactgtaggtgttcctggaaacacaaggcttaggacggctaaggacgagcatataaatgccaatgcattcgccatcaagaatccttggaatactttctcggtagacagagttggtgttcctcccttagggtggtcatcagctctgtaacccccaggtaaggcaaaagcagcaccaaaagccatcgttgtaattaatactaagccaaggccgagaaattgcgttgagtttgatattacagcatcaatcttagcatcagattgggtactaggtccttttttcatgatatcccgccgacaaatctgaagtgtagcatcagcagatattagagcttgttgtatcaaaatccgtgagtgctacagagcagaagaaaagcaacatcaagttatcaactttgtaatttttctctgaatctaggaaataaagtactaaacgaaaggaatagtaaagtagtttaccagcaggcagtataacccggtcggagtactgctaactgaaatttctcgtggggtatgttgcttgttgtttggtagattcaaatctactttgtttgcgaagagacaagtgaaactccaccaatctccaacctctacagctagatgtaatgcagtgtttccttcattatcttgcttgttcataattgacgaaaacatgggtgtctggcaggcataccgaactatatcatatcgtttcttcatgacagcaacatggagaaaagttctcccatgggtgtcacgtaagctggcgcaccctggacactttaaaagtaagatgatgacagatgaaagtctccctgctaatgcagcgacatgtatggggaatgacccttcttcgtcaggttgatatgctgaatatgcatccgcctccagtatttgcatggtaaggtccattggtgtttccactacgttcagaaaacttgtaatactggttccattcaccactggcacggcgtattggggaagcatacctcgtgtgccagtttctaatgataccgcaaagtgtagaggtgtatttccatgttggtctcgctttttagtaagctccttgttccagttcagtagtaattttgtcatatctgcaatttggtcctctctgtgtcaaacagtgcaatatgaaaaatgcatgtgaaagatacatttggaaatatttgatcatttactacaactcttaaatgttataagtagaagaatgacttggataaataaatctttaacctaggcatgaataattcgtctccacttaagagggaatctggaattaatatgtgcgtgaaagaaaatcgcacacccctgaaaatattcttgaattgtggaatgccaagatatatatgacacgagaaagtaaatggagatcatttactttagtgataggaagtcatcacaagtttgcagtaaaaatatgcttgatattttcccagtaacaaagaggaaaagaatggtctagcatatctgatatgctaagtaaatacaattattttacattcaacatgttaagttgtgttgtatatagcaaactaaatactatcattttatgatcacagcagagtggcatagaacaaatatggagggatgaatagaaattaatgcgccaagttgggaaatgattaaggtacctctgcttcgaagaactgcagcatgaagagcattctgtccatctggcccggagtatgacaacttcttgtctctctggtagagctcgcgcgcgattttttcatgctgcaaagagacggcgagaaacaagggcgaggtcccgctgtctggaacgcgagcgaggaacgggtccgcggtcatcagctcagccaccgtgagcatgtgaccagcgcgaatcgccgcatgccgggctgtctccccgagctcgttctgcatcctcaccagcgtcgtcaccctcccatcttcaccggcgacctcttcccctcttgccagctcaacgaggagagcggccatcagggcgtggctggccctggcggcgcagtgcaacggcgtgctgccgccgctgttccatgcgcacaagaggtgcggcgccttgtcgtagactgccctggctttcttcaggtacccgtaggctgctacgatgtggagcgcggagtccccgtctggggtgaccccttccaggagcaaggacaacggtggtgagcgcacggtgctggggcggtcgatgtcgacgacgacctcaataggcacgtcggccgctcctccgttcagaaggttcgtcagttccctgcaactgccatggcatgccgccttgagcagctggggatgcatggcaggtgcggttgccaccgcagtcatgctgccgatttgctgtgtgtgtgtgtggcaccaaaccagagtgacgtctctaggtaaggaattgcacaaaggcaatctaaatcagcagaagattcctttatgcttgacttgggttgcaaggccttatttgcatgcgccaacacgcaatgaatgggcagcagaaaaagtggtatatggaggcactcaaagtatcaatctggctctggtatggtcattctaattaatgaaagagctttgctacacctacgtaataaagaatacgtaacttatgaatgagctggcctggcctgattggattggtaaaaataaggcacagaaaatggtatctgatccagtaacaattcatacaactttctttggatgcagtctttgtaacaatgcatgctcttttgaggttttatattatactacctccgtctcaaaataattatcttaactttgtactaactttagtatgtgatacatttaactcgagctgcaattttgcagacagttgcgtcgagcaggaatttcttctttgcttgatcataattcataatgtgaacattcttgacattgtttttcagtttcaggcggccagaatgctaaggtcgactcatcaaatccagcagtcaggtatattatactaactccattaattaattagtggcaccgaactattcttagcttcagcaatttctttacctctctagttagctcgatcgatcaggccctaaagcctaaacactgcaatattgagttattctgcattatcctcttaatttatgccgcaaagatacatagggccccttagttgtcatttctgcatgctacaagataacgcatgtgaagtagtccagatgaacgagcaaacccactatgtgtttctatacttggatgaaccctgtgtttttattttctgtttagaacatttgactgaaccatttgtatgcttgtgcctccacaatccacatctgtacgttttttctagcactatatgtacctatctgaagttccagcaaaactgcaatgcagatttcaccttggttagttatggtgcataaatatatatgcatcaattgttacttctgcttgccacaagatctcgtataacgtggtccagagcttcagatttgcaagcaattcactagcagtactagtatagatgccctcccttttctattgttggatgaactatgttttcttcttctgtgtcgtttagctgggccactcacatgtacgtccttcaacatggcattgcaggtagcatgagcaagaaaatttcgtcgacatggacgctgatcgtgcgtgcctccaattccggtgccgcttttttttcaaacaacagttgtggttggtgtggatggcgggcttgtcttggatcatgtgattctggcagggcctattggtgtctactatgtaactttattcttgtagacgttggacttccaaatgtagttttgtaggataacatcaaatttgccttaaatggatgacttaaggtttatcaatccataggaggtgtaggacgaagatggtctatctcaaacaactctgcaatcaaatataagaaatttattgtgttcccaacacacctaatacaatggtaaattgtataggtgcactagtttaacaaagaaatggtgatacaagtgtagtatggatagtagatacaggttttgtaatctgaaatataaaaacagtaacgtagcaagtagaaaacagcgtgcaaactattgcataaatgcttagaaatagggcctagggttcatatttttactattgcaatctcttagcaatgctaacatagtatattcatatcattattcctcaacgtgcaacaaagaattactctaaagttcataagtagcggagaacataagatgaaattgatgcaggtattggaaccacctcaaggttattctttctaatcaattttttgacctattcctatagtgtcaaaaacaatcctagagttcgtactagaataaaatccacgatacctatcaatcaactctagtgtcacctagatactccaatttcacctcaagtatccgtggactaattatacgatatgcatcaaataatttcagattcatcatattaaatccaacacaaagaacttcaaagagtaccacaagatttctatcggagaacgtgctaagaaaatatgcaatcaacccccatgcatagatcccaaggtcatcggaatccgcaggttgatgccataacatatatcaagtgaatcaatagaataccccattgtcaccacaggtatccacatgcaagacatacctcaagtgttttcaaatccatcattcaatccaacataacgagatctcaaagggaaagattcaattcatcacaacaagttagcaagggaataacatcatatgatccaactagattaacaaagcccgtgatacattaagatcgtgccatctcaagaacacgagagagagattgaacacataggtactcgtacataccctcagccctgagggtgaactactccctcttcgtcatggcctcctccaggatgatgaagatggccaccggagatgattgccccctccaacagggtactagaaaggctctagatggtttttttctttgatatagagaattgcgatagcagagcggaagtctctgtttatttctgagggtttccttatatatagggttttttggcgttggaaacatgctaaacggagccgcgcgggccccacaagccattagggcacgaccacggggtggcagcgtcctgttggcttgtgtcccacatgtggctcccctctggtggttcttttctccaatatttctcatatgttccagaaaaaatcatcaaaaagttttaggtgattccgagaacttttattttcttcataaaaaacaacaccacggtaattctgctgaaaacatcgtcaatccgggttagttcttaataaatcacaaaaagtgcatcaaatccatataaaaatatcgtaaacataggtgaatatggcatgaatacttcataaattatcgatatgttggagacgtatcagcatccccaagcttaattcctactcgtcctcgagtatgtaaatgataaaagaaataatttatgaagtgtgaatgctagcatagtatacaagtttgatcaatgataattccaatcacttttctaaaatcataaccagcaattttttcataaaaatcatcatggttgagtagcaattaattcgcatgtcatggttcaaacaatatattctcttgaaacttaacaacccatgttcttagtcaccaaacaacttgagtgcatcatcaagtctaagtaagaggtccacatactcaattatcatttagttttctatgatttataatactcaaggcatatatttagaacaaacaacatccatcgaacatagagaaagataggggcttaaagtattgcctcccaatcccctttgaccgaacggaatcggagcggaagggcatttttgtaaggtcacttaacggcagaggggcaaatttgagcatgcttcgaaattaggggtaaatctgagtagtgggttcgagttagggacacaaatgtaaaagacccaacatatttatcataaagataattgtcaataataatgaatcatgatcaaatatatttgactgaatatatttgtttggatctttccccaccacatgatgcttgccaactgatacattgaggttggaataagaagttgactcaacatgaaaagtaagtaatcatgaaagtaaatagattgtccctttggagagggaagcagggatttgcagaggtgccaaagctcattgttttaaaaagagagatgaatatgtaattttaggtggtgtacctttcatgtgaatgtcacaacagagttttcaataccttccatgccaatcacattattcgcggatcccaaacagaattgaaattttactccccctccaccattcaaacacattccatggctagccgtatccacgagtgccctccaaacaatcaacttcctagggggagttcttgtttatttatttctatattatgcaggaccgggaatccttttaccagcctctcttgagcaatgacaagtgaataaacactcatcttgggaataacttgcttagcatggaagataatgaccgtcccgtcggtccatgagctgtacgagcacacaaaacagatatttatttgaatgtttagaggtggcacatgcaaatttacttggaatggcagtgaaatatcatatataggtaggtatcgtggactctcatggaagaaacttggctcaaggatttggatgcacaagtattatctctacttagtactaagttttggctaccaaaaggttctaaacaagcaccacatgttggaggatccataacaatataacttcgatgcaaatatacccaaacataaccattatgttgtcttccttgtccacttcagcaatttgaacatcattgaaaataattaatgggtattcacaatcataaaatatgtccaagataatagcccatatttgtatgtgggagttttctttcttatactaatcattcactaattgcttgtatgaccaatattgtgattgtcaaagttcaatagattttactttctaaaccaaatgtgaaattactactaaggatatagcacattagtaatttcagatgtattgtatttcactcattcacaatttactcttaggatataagtctagcacaagggtaaacatcaaactactcttaaaaagatataagtgaagatcaatgagtagttaaacaactaagtagctatgtgaggactctctctcaataaatattttcagatctgagatttatttcaaaacagaaaacaaaacaaaagacattccaagaatagcacatatcatgtggacaaataaaatttgggaacaccataggctaaccgatatttgtttgatgaagagaggtgggatgcataacatccccaagcttagatgattgagacttctttaaatatttacttggggtgccttgggcatccccaagcttgagcttttgatctcgttcaattctctcatatcccggtttcacctaagtctcaaaaactccatctagaaaaacttgaaaagaactcgtgagataggttagtgcacataagaataaatcaacactttatatacttcctagacaagttgcataataattttcaaaaattatctactgtttactataattttcacaatttatatctaccaatataagccgtgaaaactccaggataagtagataacaaaactatggcagcaatctgtctaaataggacaatgtgtagaaattaatttgaaaagagtacctctgtaactcaaagaattatgaaaatttaggacatgatgaagaatttatatgaaagcactgtgtaaacatttcagaagctttccactttccagtaaaatctgataaattaaatactacaacaaaagtttttctttttgtacatcacgcatcacgcatgcaattcaagcattctaaagacaattcttggaactttttattgaatttttgttataaataacacttaacagagaataaaaacataaaatgatgctctaagcaaaacacatattatgtgatgaataaaaatatagctctaagtaagatataccgagagtgttgaagacgaaagaggggatgccctccggggcatccccaagcttagacgcttgagtcttccttggatattaccttgggagtgccttgggcatccccaatcttatgttcttgctgctccttattcacgtcatatcggtatctcaccaaaaacttgaaaacttcaatcaaacaaaacttaacggaacttcatgagatgggttagtgtaataaagatagatcattcacttaggtactgtcaagataagattaataattgttctcaaataatacctactgtattctatcatttccataatttatatcaccaaatataagctatgaaacattaaaataagcaaactatgcatgcaaaacagaatttgtgaaaaaacagaacattttatgaagatctgcacaaataccatgcttccccgtctctaacaatttggaaaaattaggacaaagaagattatttgcattgaaaaactttgtaaaaaattagaattttttactgtccagtaaaatcagagaaattcttcagtggatgtaaaagtttctgtttttgcacagaatcaaactaacaagtatccacagtaccccaaaagatttacttggcactttactgaaataagagacaaaaaacatgatcactacagtagcttaatcatgttaacacacaaaaacataaagtataaatattgggttgtctcccaacaaacgcttttctttaaaaccttttagctaggtatgatgattttaatgatgctctcataaaaattaataattaaaacatgcaaaagagcatcataaatcacatgaaaagcacatttaagtccaacccatttcctatgcatagggattttgcaagcaaacaatttattctagcaagaatcaacttgcataggaaggcaaaacaagcataactttgaaactttgaacacacatagaggaaacttgatattattgctacaagcatatgttcctatctcataataattttcagtataatcatgaagtaattcgaaaatataactatcacataaagcatccttttcatgatgcacaagcatagaaaatttattactctccccacaagcaaatttcttctcattcatagtagtgggagaaaactcaacaaaataactatcataagatatttgattgatataatccaaatgaaaattaaaatcatgatgacaagtttcatgtttatcattattctttatagcatacatgtcatcacaataatcatcatagataacaactttgttgtcatagtcaattgaaacctcttccaaaatggtggactcatcactaaataaagtcatgacctctccaaatccacttttataattgtgaaaagattcaacaccctccaaaatagtgggatcactggtacctagagttgatgctcttccaaacccactttcatgaatataatcatcataaataggagtatgatatcatgatgtctactacacaacttgttcttgtagactcgtgttgggcctccaagcgtagagttttgtaggacagtagcaaatttccctcaagtggatgagctaaggtttatcaatccgtgggaggcataggatgaagatggtctctctcaaacaaccctccaaccaaataataaaaagtctcttgtgtccccaacacacccaatacgacggtaaattgtataggtgcactagttcgacgaagagatgatgatacaagtgtaatatggatggtaggaatatatttttatattatgaataaataaaaacagaaacgtagtaattcataaaatgtagcacaaacggtattgcaatgcttgaaaatgaggcctggtgtccgtactttcgatagtacattctctcaacaatgctaatataattggatcacataaaaacccctcaatgtgcgataaagaatcactccaaagttcctatctagcggagaacataagaagaaatagtttgtagggtacaaaaccacctcaaagttattctttcccatcaatctttccaagagttcgtactaaaataacaagttgtcctttccgatcaatctatgcaagagtttgtactaaaataacaccataaaaaattcagattcataatactcaaaccaacacaaagaacctcaaagagtgccccaagatttctatcggagaaacaaagacgagaatgtgcatcaacccccgtgcatagattaccccaatgtcacctcgagaatccacgagttgagtgccaaaacatatatcaagtgaattaatatgataccccattgtcaccacgggtattcatggcaatacataaatcaagtgctctaaaatccataaaagcattcaattcgataaaatgaaatctcaaagggaaaactcaattcattacaacaagatagagagggagaaataatcctttccgatcaatctatgcaagagtttttaccaatagctatgtgtttaatctctctctctctctctcttgtattattgagatgacacgatcttgatgtatcacgggatttgttaatatagttggatcatatggtgtaacttttgatctagggttatttctgggggtttctatatttataggaatttttggcatcggtctcacgtcaagatggaccacgaggtgcccactacccaccatcccacgggcaaggcctctggcgcgccctggtgggtagtgtccagctcctccaccttatggtcatcccacaaagcttctagtgcctcttttgttccaattttttttgtcaaaaagtttcgttgcatttggagaactttttttctacacaaaaaacaacaccacggtagttctgccgaaaacaacgtcagtctggcttagttccattcaaatcataccaaaaccatatagaattgttataaacatggcatgcatacttcataaattatagatacgttggatacgcatcatatcatcataataaatttgctcatcaatacttgggggacccaaaatatcatcttcatcaaacctaacatccccaagcttatgcctttgcatatcattagcatcatggatattcagagaattcatactaacaacattgcaatcatgctcatcattcaaggaattctcattaagtattttcataaattcttcctctaccaattgagcataattttccgaaccatcattttcacgaaggacattaaaaatgcgaagtaattgaggcaacaacctaaactccatttttttgtagttttcttttataaaaccaaactagtgaaaaataagaaactaaaagatttaattgcaagatctaaagatataccttcaagcactcacctccccgacaacagcgccagaaaagagcttgatgtctactatgcaactttattcttgtagatgtttttgggcctccaagtgcaaagttttgtaggacaacaacaaatttccctcaagtggatgacctaaggtttatcaatctgtgggaggtgtaggatgaagatggtctctctcaaacaaccgtgcaatcaaatacaagaaatctcttgtctccccaacacatgtaatacaatggcaaattttataggtgcactagttcggcgaagagatggtgatacaagggtggtatggatagtatatataggtttttgtaatccaaaaatataaaaacagcaatgtagcaagtagaaaacagcgagaaaaacaatgcatgaatgcttggaaataaggcctagggttcatactttcactagtgaaatctctcaacaatgctaacatagtaaaatcatatgatcatccctcggcgtggagtaaacaatcactccaaagttcataagtagcagagaacgtaagatgaaattggtgtaggtagtagaaccacctcaaagttattctttgtgatcaatcttttgagctattcctataagtgtcacaaatagccctagagtttgtactcgaataacacccatgatacatatcaatcaaccctaatgtcacctagatactccaacgtcacctcaaatatcgatgggataattatacaacatgcataaaacaatttcagattcatcatattcaatccaacacaaagaactccaaagagtacccccaagatttctatcagagaacatagtattaaaacatgcaatcaacccctatgcatagatccctaaggtcaccagaatccgcaagttgatgacataacatacatcaagtgactcaatataataccccattttcaccatgggtatccacatgcaagacatacatcaactgttctcaaatccattacaatcgaacataacaagatctcaaagggaaagattcaattcatcacaacaaggtagcaagggaataacatcatatgatccaactagattaacaaagcccatgatacatcaagatcgtgccatctcaagaacacaagagagagagagagagagagagagagagagagtgcacacatagctactcgtgcataccctcagcctggatggtgaaatactcccccttcgtcatggcctctgtcgggatggtgaagatggtcatcggagatgatttcccccctctgtcagggtactagaaaggctccatatgggttttttccttgatacagagagttgtgacggcggagcggaagtgtgtgtttatttgtgagggtttctgtatatataggattgctttggcattggaatcacgctatggacccacgagccatcagggtgcggccagggggtggtcgcaccgtgttgtcttgtggcccataggtggctcccctctggtgattcttcgctccaatattgctcatatgttccagaaaaaatgtcaaaaagtttcacgcgattacgagaacttccattttgtgcaaaaaaacaacacccagtaaattctgttgaaaacagcatcagtctcggttagttcaaaataaatcacaaaaagtgcatcaaagccatataaatatattgtaaacataggtgaatatggcatgaacacttcataaattatcgaaacgttggagacgtatcacctatccatgattttgtcaagcgtgataggtccactgttatttcctttagagggtttcttccgcggtcctcggtttgaattgctgaatccggcatttattgtcgtgtcctcgacatggctaccattgtgtcgacacttgttcttgttacgctatgatttcccattgccatctcgaacttcggaagtgcctgggtctcctggagtgttgctgcgatgagctaacaaattgtcctcgcccgcacaaaagcgggtcataagtgaggtgatgcccgacattgtcctcgacttgtcttggtcaagttgccaagctagccactcgtcctagatattgtttctaaaagaggctattgccttgacgtccgaacaattgatgatttggttcttcttggttaagaatcggttccaaaatttctgacctgactcgtcggattgttgaacgatgtagatcaagtcatcggcatctgggggtcggacataaatgccttgaaagttagctcagaaggcatcctcgagctcttcccagctcccaatggagttttcggggaggccattcaaccaatgtcgtgctggacctttgagctttaatggaagtattttatggcatggaggtcatctcctcaggccatatgaatgtggagaaggaagtcttcaatccacatggccgagtctgttgtcatactgctcgatgtttacgggtttacaccctttgcggaattgatgctgcatcacctcgtctgtaaagcatattgggtgagcggcgcctcagactcgagctacgtcacgcttgaggtcggctgtcatctgaaagcggtgttgttcctgagctttgtcgcttcggtcgagccaagcttggtactcgtctcatctattgggagtgtaccctttagattcataaatggaccttgtctgacccgctctagagttcaagttgtgtcgtagatcgtacgggacctcgggctgtattggttgtttccttctcccgtggggggctccatcctgtaccgtcctcgagggggcggtctagctggtcgccctgagtgcgtgtgtggagtgcgggctcaaaggcctcatcgtcaaattgtggcagcacacgtcaacacggataacttttgttttggttctgccttcattgcggtatccttcttcggctgttaggactttcgacaatatgacgttaagggtgtgttgttcggctttgatctgcttatgtttcatctctaggcttcgggcggtgtctataagctaacgcttaaaccgtcttgatcgagtgggtcttcgaggacgatgagatcctcatctctgagactaccctcctattcgaagaggggaaagtagttgctgcctttggagtaattgtggtcctcaggattatcctgatcctcgtgtgcctccgaatcatcgacctgttgtttgggggtagcgaggtcagagatgtcttccggattgttcggggtatcattttgttcggtgcccgtgttgcttcccttgcccttgcgctccttcgattgtttgcgctgccgtcggagcttgggtggttccttgccgtttgtcaaggggtgtcgtcaccgctcttccgtgtggtgtcatcacccttatcatcgggggtgtccaccatctagacatcgtaggtggaggtggttgtccaccgtccagtaatgggaggagtagtggcatcgacatcttcatttatgtcctcggcctcttccgatgataagtctagcatatcggttaaatctttgataggggctatcaagtgagtggtgggtgggacataaaattcttcgtgtcctgcctcaagaccgacctgagcataggtcgagggcaggtcacacgtgatgttcatagtctggatcagaagccaacatctcgtttaacaacgagaaatcagtcagactattctccaaaaaatttgcggagttgatctccgccgcatcggcatgtggagcatgctcggccaaggctgacccctgatcttcggatgctttgatcggatccgagatcaaagttggatccaggataaggctcgatccggtgacgaggctgagcaggaggcccgaagttaaagcttcgggatttccgagctcatcggtcaaggccaagagccccgtaaggaccagatcaccgtgggcattggcaatgtactctaggtctccgtacttaatctactgctctggggtgaaggcgacgatctggtcaaggtgttcggtcgcatcggcttgtaggacgatgctgccaaacgcgaagagctggccggggatgagggtatcccggcgttgatcttatcgccgatgaccaagcgagccatcgatccttcggtgatcctacaacgaaactctcaatgaagtcactatggatcttggatcaatgggtaataggaaacaagggtacaatatttacccaagttcgagctctctcgaagaggtaaaacccacgccctgctcgattatattgatgagtgtatgatggttacagagtcgatctaccacgagatcagttggactaaatcctagatgatggttatgtcgatgttgtctacgaactaaaaccctctggtgtatatagacactagggatacctagggtggcatatggtcaattatatccaagaataaataggccgatattatcatcttgacttggaggacacactaaggcttcggaagcttccatcctgaacatggcgtcaccttgtagtctgtcccttcaatgatagccatagagcggcccatgagtccggcccgtagagataggtcggcagcccgaggaccccttagtcctagactccctcagtctctcctcctcaagctctgagtgctagctttagaacatgggtgatcagataacaccccactattcatcatcaaccatgcaagtaaacataataaactgtatttaaacacttcactatcaaaaaacactaacacctcacaatcaaaataacaaaaatcaaaacatctccattgcggacctaacacttcattcatccatacagtagaaccccaacaaaatttaagaggccataaacatactaaaaggtaacacctgactaccaaaaatcactatagcttcattatcaaaaagcccttttggactcaacacctcgtccatccacctagccggaacccaacaataaattaacaagcgcttgcatatccatctagtaggaacacacaagcaactaacatgccattctaatctacaacaagtaagaccaaaaaacaacaattgcatgatgtatggaaggtagaagaaacctacctaacgtcaaaccttggcaagggaaaagcaagcacacaggtcgatgggagagccaagcaataacaggacctagaacagaaaagaaaataatcatttagagaagacaagcaagcggtacacaaggcaagagcaagaagaaagccataggaaaacaatggatcaagccatgtctgaacaaagaactcaaaagatgacacatgtgacctgacagtactgcacgaatctaaaaacaaataatcagatatccaagaaaatagactaaacccagaatggaaactgagatttacttgctcatacccaacaagcaaccgtgtaaacaaatcaaacgcaccacatagcaagaaaccaacatcgaaagaaaatagtcgcaacaagaagcacaatctagcatgactgaatctgataatcacctcgtcaaagaatataattcaaggagaagaaaaaatccacatcaacctgaagaggtattttatcaatcgagcacgtgaaacgcacaatagaaaaagtggagctcaccttccaacaaatgcagcgaccaggcgtacaacagagagcgaggaaacaaatcagcagcagcggtcctagggacaacaagagaagaagaaggaaaaggaagaacaaatcagtggataatgcaagcactggagacacaaagtgggtctattggaagaagaggcatattataccctaaccaaacgcaacaaaggcaacgatgggaaggaaagccattggcacaagcaagacaatggtgggcgacgatggcgggggacgattgcaaggcaagacgaacaaagatgcgaagactgccgatgtgaagcttactgggaaaggagagaaccggacagacatgttaaaggagaaagaggtgtgcgtctccatgccagcaacactaagcacacacacggtaactcctaaagaaacccagaagagaatgatcaccccactgacatgccactagtagaaaagatggctttggtccacttgatgaaatcccattagtcgcggttcgctcacgaaccgggacccatgtggtcattggtcccagttcgtgaggccagggcgccgatcgggcctcgtgggccattggtcccggttcgtctgacaccttcagtcccggttccagacacgaaccgggaccaatgtgccttgctcctggcccataaccagtagtcccggtttgtggctggaaccggaaccacaggttgaactttagtatcggttccagccacaaactgggaccaatggttggcctatatatacccccagcccgcgagcagagcagtgcactgctctgttttttttagccggccgtgggagagctttgtggtgctctagctcacctcctatgcacatgaggtgttcgttgaaatgcccgagccacacttaagttttctcctctcgaagctccttgtccaagctccattttcctcaagatttgtgtagctttggcggtccgtctcctgtcccgtcccgtcctcaccgtcgtcgatcgcccgcgcccatctcagcgccgacaccaccgtggttagtctcttcttcttatcttttttctaaaagaaaaagttctcacttgtatgatttagatagatacttatgtaattttcttacttttattattgtttgttattatatagtgtgatggttttggtatccgcctccgtcggccctcgtcctgtctatgattcggatgtggtatatattatcttttataactatttgttttatttagtgtttatgacaattatgccgaccaacgtgacatagattttttaatctaggaggtatgtgaaccggaaattcgaaccgacatagaaattcttgccgataagttaaatttggttgaaaaagaaaacaattacttgaaagaaaaattacaaagagttgaagatgagaagatgatattggagttggatgttgccgatatcgtcgacggtcacaagatcaagatggatgcaatgcgcttgaagattagaaagattagaaaatatgccattaatactgagtcttggtatcattatgtcgttggatcaattggtaccttagttgcggttatgatcgcatttgttgttgcatttaaattttatagtttcaatgtatgttctaattagatgctctagagagctatatgttgttcaataatgagaactatgtatgaatgttatgttattttgtttactactgtactttggctttaatgtgctgatgaatttctattaatttggtcacttctctattcatgatatgttggaatgatttttaatacactattatataacgcacacagatgaaccggcaatgaatgtacggtgaccgacgcaccttcgggtatattaagggcctgcataattttctcgaagcggctgaggcaaacaagcagaatggttttatggattgtccatgtactgtctgtgggaatacgaaggctttctccacctataaaaccattcacttccaccttcttcacaagggttttatgccacactataatgtttggaccaagcacggagaaagaggggttatgatggaggacaatgctgctggctacgcctatagggatttccttggcaagtatgcaaaggattcccccgcggccttggagccttgcgttggtgttcccttgaagaggaaagggtgatgtagcacaacggcgataagtatttccctcagtttgagaaccaaggtatcaatccagtaggaggactgcactggggtcacaagtacctgcacaaacacaaagagcttgcacccaacactatgaaggggttgtcaatcccttatagattgattgcaaagtgagaactgaaagcaaaaaagtaaacaaagcaaagtaaaaagtaaaagctgagatgataattgtgagtagacccgggggccgtagcattcactagtggcttctctcatgaaggcaaatagacggagggtaaacaaattactgtcgagcaattgatagaaccgcacaaagtcatgacgttatctacgcaatgatcatcatataggcatcacgtccaaaacaagtagaccgatactttctgcatctactactattactccacacatcgaccgctatccagcatgcatctagtgtattgagttcaaaagaacagagtaacgctttaagcaagagacatgatgtagatgaacaaccccatatctatgacaaagctcatcttgttacccttgatggcaacaacacgatgcgtgcctactagctactaactacggacccgtaggtctgaagtagactactcacgaatcattggagaggcaatggtgttgatgtagaagccctccagctccaaagtcccctccggcagggcaccggcaggagtctccagatgagatctcgcggaaacggaagcttgcggcggcggaaaagtggtttcgtggatgccttgattttttccaggattttagagaatatataggatgaagatctaggtcagagggccgccaggggggccacaagcttggccggcgcggcctcccccctggccgcacggggcaggcttgtggggcccctggggcacctcttgcttggccctcaagtcctctgatcttttctggttcgggaaaaatcattccggggattttattctgtttggactccgttccaaaatcagatctgaaaagggtcaaaaacacggaaaaaacaggaactggcacttggcactgaattaataagttagtccccaaaaagatataaaaggtatataaaacatccaaagttaacaaaataacagcatgaaaccatcaaaaattatagatacgtttgagacgtatcagacaacatagaagaacatgatgatgacaactgttgtgtaacgtagaaaaattcaaaattttcctacgccatacaaagatcttcctatggagaaaccagcaacgagagaggggtaagagcatcttcgtacctttgaagatcgctaagcgaaagcgttgctagaacgcggttgatggagtcgtactcgcagcgattcagatcatggtgtggttccgatctagtgccaaacaacggcacctccgcgttcaacacacgtgcagcccggtgacgtctcccgcaccttgaaccagcaaggaagagggagaggttgagggagagctccggcagcacgatggcgtggtggcggtggagctacgaggtattccgacagggcttcgccaagagagagttttctggtgtctcaaatcagccaaaacatccactatatataggggggagggagggggcacaccctttagggttcccacccccaaagggtgcggcagccctagatgggagggcctggcgacggccagggcagggagaggggtggcgcaccccttaggtgggccttaggcccacctgcgcctagggttccccccttcctctcttgtcgcgccttgggctgagtggggaggcacacaagctcacctaggggctggttccctaccacacttggcccatgtagcctcccggggctggtgacccctcccggtgggcccccggaacccttccggtggtcccgacactttgtcggtggtgcccgaaacatttccggcatccaaacccatccatcctatatatcaatctttacctacggaccattctggaacacctcgtgatgttcgagatctcatccgggactccgaacaaccttcggtaacctcgtacatcaattccctataacccaagcatcattgaaccttaagtgtgtagaccctacgcgttcgggaagcatgcaaacatgaccgagacacctctccggccaataaccatcagcgaggtctggatacccatggtggctcccacatgttcgacgatgatctcattaaatgaaccacgatgtcagggattcaatcaatcccgtatacaattctctttgtctaccggtatagaacttgcccgagattcgatcgtcggtatccctataccttgttcaatctcgttaccggcaagtctctttactcgttccgtagcacatcaccccttgactaactccttattcacattgagctcattatgatgatgttctaccgagtgggcccagagatacctctccgtcacacggagcgacaaatcccgatctcgattcgtaccacccaacagacactttcggagatgcctgtagtgcacctttatagtctcccagttacgttgtgatgtttgatactcccaaagcattcctacggtatccgggagttgtacaatctcacggtctaaggaaaagacacttgacattagaaaagctctagcagacgaacaacacgatctagtgctaagcttacgattgggtcttgtccatcacatcattctcccaatgatgtgatcccgttatcaatgacatccaatgtccatgatcaggaaaccatgatcatctattgatcaacgagatagccaactagaggcttgctagggacacattgtgatctattcattcacacatgtattactatttcctgttaatacaattatagcatgaacaatagacgattatcatgaacaaggaaatatgataataaccattttattattgactctagggcatatttccaatagtctcccacttgcactagagtcaataatctagttacattgtgatgaatcgaacacccatagcattctggtgttgatcatgttttgcttgtggaagaggtttagtcaacgggtctgcaatattaagatccgtgtgtactttacaaatatctatgactcctttctggacctagtcctagatggagttgtagcggtgttggatgtgcttggtcttcttgtgaaacatgggctccttggctatggcaatggctccaatgttatcacagaagagtgtcatcaggcctgatgcatttgaaaccactccaaggtcggtgatgaactccttcatccagatcccttcatgagctgcttccgaagcagctatgtactccgcttcacatgtagatgctgccacgacgtcttgcttgttgctgcaccagctgactgccccaccattcaaaacatacacgtatccggtttgtgactgagagtcatccggatctgtgtcaaagctagcatcggcgtaaccctttacgacgagctcttcgtcacctccataaactagaaacatctccttggtccttttcaggtacttaaggatattcttgaccactgtatagtgttccatactgggatcactttggtacctccctaccaaacttatggaaaggtttatatcaggtctggtacgcagcatggcatacattagagggcctactgctgaagcgtaggggacactactcatcttctctctatctgctactgtggtcggtgattaagtcttactcaatctcataccttggaaaactggcaagaaccccttctttgagttttccatattgaacttcttcaatatcttgtcaaggtatgtactttgtgaaagacctatgaagcgtctcgatctatctctatagatcttgatgcctaatatgtatgcagcttgtccaaggcccttcattgaaaaacttttattcaagtaggcatttatgctctccaataactctatatcatttcccatcaataatatgtcatctacatatagtatgagaaaagatacagagctcccactcactttcttgtacagacaggcttctccatagatctgtatgaacccaagcgctttaattacctcattaaagcgaatgttccaactccgagatgcttgcatgctacttcccagtcacgtcaccagaacttggcaatttgactcgagattgcgttggttttgcccttgaagaggaaagggtgatgtagcacagcaacagcaagtatttccctcagtttgagaaccaaggtatcgaaccggtaggaacttcaagataaagctccaagtgacctgcacaaaaaacagaaacttgcacccaaagcgacaaaggggttgtcaatcccttcacgattgtttgcaaaagtgagatctgacaaagaaagtaatatagatcggaaaacagtaggtggaaaatagacccaggggccatagtgttcactagaggcttctctcataaaagcaaatatcacagcgggtaaacaaattactgtcgagcaattgatagaattgcgcaaagtcatgaagtcatctaagcaatgatcatgcatataggcatcacgtccgagacaagtagaccgatactgtcagcatatacttcttattactccacacgtcgaccgctatccagcatgcatctagtgtattaagttcatgcaaacagagtaaagctttaagcaagatgacatgatgtagagggataaagtcaaaccaatgatgaaaaccccatctttttacccttgatggcaacaacacgatacgtgcctcgctaccccttctgtcactgggtgaggtcaccgcatggtatgaacccaaaaccaagcacttctcccattgcaagaatcatagatcaagttggccaaacaaaaccgataactcgaagagaattagaaggatatgaaatcatgcatataagaaatcagcaaagactcaaatatatatcatagataatctgatcatgaatccaaaattcatcggatcttgacaaacacaccgcaaagaagaattacatcggatagatctccatgaagatcatggagaactttgtattgaagatcaaagagagagaagaagccatctagctactagctatggacccgaaggtccgtggtgaactactcaagcatcatcggaggggcaatggtgttgatgtagaagccctccaactccagatccctctccggcagagtaccggaatggtctccagatgggatctcgcggaagcacaggcttgcgacggcggaaaagtaattgcggctcttttttttccgtggcacgatttatcggaatttataggcggaagaagtagggcaccggaaccacgtggggcccacgagctcccacggcgcggccaggagggggggcgtgccctgggggctcgtggcctcccacggtctccgttgccttggttctcaagtctcgtattcttcttattttcggaaaaaaatcagggtgaaagttttattccgtttggactccgtttgatattcctatctgcaagagttcaaaaacaaggaaaaaacaggaactggcactgggctctgagttaattagttagtcccaaaaaagatataaaacatcatataaatgcatagggaacatccaaagttgatactaaaacagcatggaacactcaaaaattatagatacgttggagacgtatcaagcatccccaagcttaactcctgctcgtcctcgagtagggaagtgataaagaccgaatttttgaggtggaatgctacctagcatattttgttctttgtagctcctttattgtggcatgaatgttcaaatccataagattccaaatcatagttcaatgttgacatcaaaacaataatacttcaagcatgctagcaaagtaatcatgaactttcgaaataacaaggcgaaaagaaagttatccctacaaaatcatatagtctggctatgctctatcatccttgcacaactaatttaaatcatgcacaaccttggtattggccaagtaattgttttcacacctttactttctcaaactttttcaactctcacgcaatatatgagcgtgagccatggttatagcactataggtggagtggaatatggtggaggttgtgaggcaaaaatgaagaagatgatcacattgactaggcatatcaatgagctatggagatgctcatcaatagatatcaatgtgagtgagtagggattgccatgtaacggatgcacttgagcttataagtgtatgaaagctcacaaaggaaactagtgggtgtgcacccaacttgcttgctcacgaagacctagggcaattttgagggagcccatcattggaatatacaagccaagttataatttaccactaataaatggaagtgacaacataggagactctctatcatgaagatcatggtgcctatttgaagcacaagtgtggaaaaaggatagtagcaattgtcccttctctcttttctctcatttttttgtgtgtgggctctttggcctcttttttttgttttttttggtgatcatatttggccactttttttgtaatgggcttcgctggcctcttttatatcctcacatgggacaatgctctattaatgatgatcatcacacttacaactcgaaactttagagcaatgatgagtctatatgaaatgccttcggtagtgtatcgtgacaatgatgtagcatagcaatgacatcaaaaaacggacaagacatagaaacatcatgctagctatcttacgatcatgcaatggcaatatggaagtggtggcacatgtcatgagacggaacggtggtagttgcatggcaatatatctcggaatggctatgaaaatgccatgataggtaggtatggtggctgttttgagggaggctatatggtgggtttatgcaccggcgagagttgcgcgacactagagaaggtagtaatggtggaaggtaaaagtgcatctaaaccatggactcacattagtcatgaagaactcatatacttgttgcacaagttttagtagtaatcgaaacaaagcattcaacgcatactcctaggggaagggttggtaggtataaaccatcgcgcgatcccgaccgctacacaaaggatgacaatcaataaactaatcatgctcaaacttcatcaatagcggttcaccatacgtgcatgctacgggaatcactaactttatcacatgtatgtctagatttacaacaccctactatcataaatctaatattaccataagcacatctcaaaactaagcaagaggaagcaaatttctcctactaatcaatgcacttaaatatggaggttttttattgtatcctctttggatgcctatcacatataggactaacttcatagcacacgccaattaccaatttctttaagagagcactcccaaaaaaatataagtgaagatcgagagtttctatttctacaaaatatgccaccgccgtgctctaacaagatttaagtgaagcactagagcaacaaatcaactagctcaaaagatataagtgaagctcatgggagcaaaagtgtctagctcaaaagatataagtgaagctgaaagagtattctaacaaatacacgatgagtgcgtgtctctctcaaaaataggtgtgcagcaaggacaattgtggcacaactaaaagcaaaaactaatataacacacgacgctccaagcaaaacacatatcatgtggtgaataaaaatatagctccaagtaacataccgatggattgaagacgaaagaggggatgccttcccggggcatccccaagcttaggctttttggtgtccttgaatttggcttgggatgccttgggcatccccaagcttaggctcttaccactccttgttccattgtccataggaagatcacccaaaacttgaaaacttcacaacacaaaacttaaacagaaacttgtgatatcattagcacaaggaaacaaactactaacttgatgttggaaatatgccctagaggtaataataaataagttattattatatttccttgttcatgataatcttttattatccatgctataattgtattgattggaaactcaaatacatgtgtgggtacatagacaaaacactatccctagtaagcctctagttgactagctcgttgatcaatgatggttaaggtttcctgaccatggacaaggtgttgtcacttgataatggggtcacatcattaggggaatgatgtgatggacaagaccaaactattaacgtagcatatgatcgtgtaagtttactgctacagttttatgcatgtcaatgtatctattcctatgaccatgagatcatgcaactccctgacatcggaggaatgctttgtgtgtatcaaacgtcgcaacgtaactgggtgactataaagatgcactacgggtatctccgaagatggctgtggtgttggcatggatcaagactgggatttgtcactccgtgttacggagaggtatctcaaggcccactcggtaatgcaacatcacaaacaagccttgcaagcaatgtggctaaagagttagacacgggatcttgtattacagaacgagtaaagatacttgccagtaacgagattgaaataaggtattggataccgacgatcgaatctcgggcaagtaacataccgaaggacaaaaggaatggtatacgggattatatgaatccttggcacagtggttcaaccgataagattatcatagaatatgtaggatccaatatggacatccaggtcccgctattggatattgactgagaggtgtctcaggtcatgtctacatagttctcgaacccgcaaggttagcacacttaaggttcggtgacgtttcggtattgttgagttataggtggtggaaatcgaagttttgttcggagtcccggatgagatccaggacatcacgaggagttctaaaatggtccggaaatgaagattgatatataggatgacttcatttggttaccggaaggttttcgggcattaccggtaatgtatcgggaatgacgaatgggttccggatcttcaccgggagggggaccacccacccgggagggcccaaggaccttgggggtggcgcaccaagtaggtggggtcagcccaaggctgtcttgcgcaagagagaaagaaaaaaccaaaagaagagaaagaaaaaaaaggaaaggtggaaagtaagagaaggactcctccctccaatcctagttggactaggattggaggaggactccaattcctccttgtggcacagcccttggggctccttgagcctcaaggcaagcccctcccccttcctcctatatatactaaaggtctagggctgatttgagacaacttttgccaagtgcaactcagatctagacagctattcttctccgtttttcctctagatcgcgtttctgcggagcttaggcgaagccctgcaggaatagcatcaccaccaccaccggagtgtcgttaggctgccggtgaactcatcaccctccccgtctctcttgctggatcaagaaggcggagatcgtcatcgagctgcacgtgtgctgaaggcggaggtgccgtccgttcgacgctagatcgggacggatcgcaaggcggttcgtgggacggatcacggggctgttcgtgggacggagatttggatctcacgagcgtaccactacatcaaccgcgttcattaacgcttcccgcttagcgatctacaagggtatgtagatccactctccctctcgtagatgatcatcaccatgataggtcttcgtgagcgtaggaaattttttgtttcccatgctgcgttcccccacagtggcatcatgagctagggttcatgcatagatgattttctccagtagatcacaaaggggtttgtgagcgttgatgtttaagttgctatcctcctttgtcttttcttgattcggcggcattgttgaatcgaagcggcccaggcggacattactcgtaaccacgagagactggcttcaccgttaacatgcaatatgattgcatcaaggtggcttagtgggtgcctgtttcttcaactttagttgaatcggattagaacgaggcggatcttggagaagatgaaaaagcaacttactcatcaccgttgtggttttatgcgtaagtaagatgtgatcatactagatacccatagcagccacgtaaaacaagcaacaacaaattagaggacgtctaacttgtttttgcagggtatgcttgtgatgtgatatggccaacaacatgatgtgatatattggatgtatgagatgtgtcatgttgtaatagttaaatatcgacttgcacgtcgatgctacggcaaccggcaggagccatatggttgtttttaaactaacgtttgtgcttgcagatgcgtttactattttgctaggatgtagcattagtagtaatagcatagatagcacgacaaccacgatggaaacacaatgatggagatcatgatgatggagatcatggtgtggcgccggtgacgatggagatcatgccggtgcttcagtgatggagatcgtgaagcacggagttcatggccatatcatgtcacttatgatttgcatgtgatgttaatccttttatgcaccttgttttgcttagtaacggcggtagcattatgaggtgatctctcactaaaatttcaagataaaattgtgttctccccgactgtgcaccgttgctacagttcatcgtttcgagacaccacgtgatgatcgggtgtgatatactcaacgttcacatacaacgggtgcaaaacagttgcacacgcggaacactcgggttaaacttgacgagcctagcatgtacagacatggcctcggaacacaggagaccaaaaggtcgagcatgaatcatatagttgatatgattagcatagagatgctcaccattgtagctaaactcaactcacgtgatgatcggacttgagctagtgaatttggatcatgcaccactcagatgaccagagggatgtattttctgagtgggagttattagtaatatgatttgctaaactcaatttcttcatgaacatagtcaaaaggtcttcacaagttatgtcgtagcatacattgtagctctactgttttagatatgttcctagagaaaatttagttgaaagttgatagtagcaatcatgcggacttggtccgtgaactgaggattgtcctcattgctgcatagaaggcttgtgtctttgatgcaccactcagtgtgctaaaccccgaacgttgtctgttgatgttgcgaacatccaacatacacgattttgatgactacatgatagttcagtgcataatgcttaaacggcttagaagtaaggcgcggaagacgttgtgaacgtcgcgagacatataagatgtttcaagagatgaaattaagatttcatgcttgtgcctgtgttgatggatacaaaaccttcaacatgattctttgcatacaaagtaagggagaagaagctcaatcattgagcatgtgctcagattgtctgagtgctacaaattgcttgaatcgagtgggagttaatcttccagatgagatagtgatggttctccaaagtcactgtcaccaagctactacagctttgtgatgaactataatatatcaaggataaatatgatgatccttgagcaattcacgatgtttgacgtcacgtaagtagaaatcaaattggagcatcaagtgttgatggttagtagaaccactggtttcaagaagggcaagggcaagaagggatacttcatgaaacggcaaaccagttgctgctctagtgaagaaacctaaggttgaacccaaacccgagactaagtgcttctgttatgaagggaacagtcactgagggggaactaccctagttacttggtagatgagaaggctggctgagtcgacaaaaggtatattggatatacataattttgatgtgtactttactagtactcctagtagcaccggggtattagataccggttcaggttgctaagtgttagtaactcgaaataaaagctgcggattaaacggatactagctaaaggtgaggtgacgatgtgttggaagtgtttccaaggttgatatgatcaacatcgcacgctccctctaccgtcgggattagtgttgaacctaagtgttacttggtgtttgcgttgagcatgaatatgattggatcatgtctattgcaatacggttgttcgtttaaatcagagaataaaaggttattctatttggttgaataataccttgaatgctcatgcaccaatgtgagtggttcattgaatctcgatcgtagtaatacacatgttcatgatattgatgccaaaggatacaaagtagtgatgatagtaccacttacttgtggcactgacacttgagtcatattggtgtaaaatgcatgacgaagttccatactgatggatcttgagactcactcatttttcaaaacgtttgaggcatgcaatccatgcctattggtgtaactgcatgaaggaactccatacagatggattgttcggattcacttgactttgaatcacgtgaaacatgcaaatcatgccacataggtaagatgaatgaaggcctcgttttcattgagatgaaaaagagatagtgacttgttggaagtaatacattttgatgtatgcagtccaatgagtgcttaggcacgcagtggatatcattatgttcttacttcactgatgatttgagtagatactaatatatttgcttgatgaaacacaagtctgaattattgaaaggttcaagtaatttcagagtgaagttcaagatcgtcgtgacaagaggatgaaatgtctacgatatgatcgtggagatgattgtctgagttgcgagtttggttcatgatttaagacaatgtgaaaattgtttcacaactaaggccacctggaacaccatagtgcgatggtgtgtccgaacgtcatagccgtgcactattgatatggtgcatactgtgatatctcttatcgaattaccactgtaatgttttggggattatgagttagagacaaccgcattcactttaatagggcatcacgtatttccgttgagatgatatcgtataaactgtggtttggagaaacctaagctgtcgtttcttgaaggtttggggctgcaatgcttatgttaaaaagtttcaatctgataagtttgaacccaaagcggataaatgcatattcatagagtatccaaaacagttgggtatacctcctatctcagatccggaagcaaagtgcttgtttatggaaacatgtactttctctagagagagtttctctcgaaagaattgagtgggaggatggtggaaacttgatgaggttattgaactgtcgcttcaaccagtgtgtagcagggcgtaggaagttgttcctatggtgcctacattaattgaagtgggagctgatgatagtgatcatgaagcttcagatcaagttactacgaacctagtaggtcgacaaggtcacatactgctccagagtagtacggtaaccctgtcttggcggtcatgttgtttgacaacaatgaatctacgagctatggagaagcagtggtggacccggattccgactaatggctggaggccatgaaatccgagagaggatccatgtatgaaaacaaagtggtgactttgtaagaactacttaatggtcgtaagactgttaagtgcacatggatattaataaggaagacagacaatgatggtgacaatcactattaaggaaaagctcaacttgtcgcaaagatgtttccgacaagttcaaggagttaactatgatgagactttctcactcatagtgatgctaaaaggtctgttggaattgtgttagtagttgctgcatattggagatggatgtcaaaatgttgtttcctcgacggtttgcttgaggaaaggttgtatgtgatataaccagaaggttttgtcgatcctaaggatgctaacaagtatgtgagctccagtgatccttccaaggactggagtaagcatctcagagttggaataggcactttgatgagatgatcaaagttttttggttcatatgaagtttatgagaaacttgtatttccaagtaagttagtgggagcactatagtattcctgattagtatatgtggttgacatattgttgatcgcaaataatgtagaatttctgtaaagcatataggtttgtttgaaaggagtttttcaaaggaaaaacctggattaagctacttgaacatttagcatcaagatctatagtgatagatcaagatgctagataatactttcaatgaaatgaatgccttgacaaagtttttgaaggagttcaaaaaggtcggcgaagaaggagttcttagctgtgttgtaaggtgtgaatttgagtaagactcaaaacccgaccacgggagaagaaagagtaaggacaaaggtcatcccctgtgcataagccataggatctatagtatgctatgctgtgtaccgcacctgatgtgtgccttgccatgaatctgtcaaggggtacgaaagtgatccacgataggattactggacagcggtcaaaagttgtccttagtaactagtggactaaggaatttttctcgattatggaggtgataaagagttcgtcgtaaagggttacgccgatgcaacctttgacactaatccggataactttgagtagtaaaccggattcgtatagtagagtagtcaattggaatagttccaattggcgtgtagaagcagcgtttgcaggataacatagagatttgtaaagcacgcacggatctgaagagttcagactcgttgactaaaacctctctcgcaagcaagacgtgatcgaaccccaaaactgtatgggtgttagattcgttgaaatcacatagtgcaagtgggagactgttggaaatatgccctagaggcaataataaataagttattattatatttccttgttcatgataatcgtttattatccatgctataattgtattgattggaaactcaaatacatgtgtgggtacatagacaaaacactatccctagtaagcctctagttgactagctcgttgatcaaagatggttaaggtttcctgaccatggacaaggtgttgtcacttgataatggggtcacatcattaggggaatgatgtgatggacaagaccaaactattaacgtagcatatgatcgtgtaagtttactgctacagttttatgcatgtcaatgtatctattcctatgaccatgagatcatgcaactccctgacatcggaggaatgctttgtgtgtatcaaacgtcgcaacgtaactgggtgactataaagatgcactacgggtatctccgaagatggctgtggtgttggcatggatcaagactgggatttgtcactccgtgttacggagaggtatctcagggcccactcggtaatgcaacatcacaaacaagccttgcaagcaatgtggctaaagagttagacacgggatcttgtattacagaacgagtaaagtgacttgctagtaacgagattgaaataaggtattggataccgacgatcgaatctcgggcaagtaacataccgaagaacaaaaggaatggtatacgggattatatgaatccttggcatagtggttcaaccaataagattttcgtagaatatgtaggatccaatatggacatctaggtcccgctattggatattgactgagaggtgtctcaggtcatgtctacatagttctcgaacccgcaaggttagcacacttaaggttcggtgacgtttcggtatagttgagttataggtggtggaaatcgaagttttgttcggagtctcggatgagatctaggacgtcacgaggagttccggaatggtccggaaacgaagattgatatataggatgaattcatttggttaccgaaaggttttcgggcattaccggtaatgtaccgggaatgacgaatgggtttcggatcttcaccgggagggggaccacccacccgggagggcccaaggaccttgggggtggcgcaccaagtaggtggggtcagcccaaggctgtcttgcacaagagagaaagaaaaaaccaaaagaagagaaagaaaaaaaaaggaaaggtggaaaggaagagaaggactcctccctccaaacctagttggactaggattggaggaggactccaactcctccttgtggcgcagcccttggggctccttgagcctcaaggcaagcccctcccccttcctcctatatatactaaaggtctagggacaacttttgccaagtgcaactcagatctagacagccattcttctccgtttttcctctagatcgcgtttctggggagcttaggcgaagccatgcaggaatagcatcaccaccaccaccggagtgccgttaggctgccggtgaactcatcaccctccccgtctctcttgctgaatcaagaaggcggagatcatcatcgagctgcacgtgtgctgaacgcggaggtgccgtccgttcggcgctagatcgggacggatcgcaaggcggttcgtgggacgaatcacggggctgttcgtgggatggagatttggatctcacaagcgtaccactacatcaaccgcgttcattaacgcttcctgcttagcgatctacaagggtatgtagatccactctccctctcgtagatgatcatcaccatgataggtcttcgtgagcgtaggaatttttttgtttcccatgctgcgttcccccacacttgaaaggtactgaagtgaactagaattccattcatattggtgttacactactgtattctaacttttccatgggtcgtacccccccgatactatccatagttttatcaaaacaagtgatcaacacaatgaaaacagaatctatcaaaaacagaacagtctgtagcaatctgtatactccgtatacttcttttacctcaaaaaatctgaacaattacgaaagtctggagaaattgcatagcaatcatcatcaaaaagaataaactcaaaagctcttacagaataaaaatgaaaattcttttcgtgagcagaaagtttctgtcttttccagcgtgatcaaacaatcatcaccaagactaatcataacgttttcacttggcataaatgctaataaatcacaaaaaacaccatcataacagaattttgaaagtgtggaaaacacaaaacagaaagtaaaaaagcaaaaataaattgggttgcctcccaacaagcgctattgtttaacgcccttagctaggcacaaggcaaaaagaatcatgtattgtcatctttggtgcccaaaccataagtggccctcataatggattcatagggcaatgttattttatttctaggaaaatgctccatgccctttttaaaaggaaattgaaatctaatattcccttccttcatatcgatgatggcaccaatagtccttaggaaaggtctaccaagaataatagggcatgaaggattgcaatcaatatcaagcacaatgaaatccacgggtacatagttcctatttgcaataataagaacatcattgatcctccccatgggtttcttaatagtagaatccgcaagatgcaaattgagggaacattcaacaatctcattaaaaccaagaacatcacataaagactttgggattgtggaaatactagcacccaaatcacacaaggcatggcactcataatttttgatcttgatttttatagtgggctcccactcattatggagttttctagggatagatacctctaattctagtttctcctcaaaagatttcattatggcatctacgatatgcttggtaaaagccttgttttggctataagcatgtggagagtttaatacgaattgcatcaaggaaatacattcaatcaaagagcaactatcgtaattaaattccttgaaatcccaagtagtgatttcatcaccactcaaaattttgcaatcctctactccacttttgatgtttttagcatcaagataagtgacctccgaatcgttgggacgtttttcaaccaaagtggattcacatccagccccattatcaaaagaattgacacgcgaaaacaaagattcaataggagacacgccaagcatcttaagatctttgtgattttcatcacgagaacgcgcctttttaagccattcatgcctagcacgaatttgggcggttctttcttcactctcaaccatagaaacacgcatagctttcaaagtttcatccatactaattttgggaggaacacatcgcaacttcaaagaatcaatatcaagagacattctatcgacggtcctagccaaatcatcagtcttaagcagtttttcctctatggaagcattgaaagacttttgtgaactaataaattcctttatattgctctcaagatcagaggggaatttattataatttccatgagagttgttgtaggaattgctataattgttagagggattactaggaaaaggcctaggaaaatttcctctaaaagcattgttaccaccaaaattattcctaccaacaaaattaacatccaaactctcgttgccattctcaatcaaagatgatagaggcatatcattaggatctaaaggaacactcttactagcaaacaatttcattaactcgtccatcttggcactcaaggagttaaattcttctaccgcatgcacttttttactagtaggcgccctttcggtgtgccattgagaatagtttgtcatgatattatctaggagtttggtagattctcctaaagtaatttccatgaaagttccaccggaggcggaatccaagatgtttctagaagcaaaattcaagccagcataaaagatttgtataatcatccaaagactcaaaccatgagcgggacaatttctaatcattaacttcattctctcccaagcttgtgcaacgtgttcatggtctaattgcttaaaattcatgatatcgttacggagagaaataatcttagctggaggaaagtacttggaaataaaagcatctttacacttgttccaagaatcaatactatttttgggtaaagatgaaaaccaagtttttgctctatctcgtagcgagaacggaaataacttcaacttaatcatatcattatccacatatttcttcttttgcatatcgcaaacctcaatgaaggtattaagatgggatgcggcagcttcactaggaaggccagaaaattgctctttcataacaagattcaacaacgcagcattgatttcatatgaatccgcactagtggcgggagcaataggagtactaataaaatcattattattagtattcgagaagtcacacagcttagtgttttcagacatggtgacttggcaagcacacaaacacacgggcaaaaggaaagcaagcgaaaaagacgggcgagagaaaacgacaaatggtgaagtgggggagaggaaaacgagaggcaactggcaaacaaagtaaatgtaagagatgagtttgagaggtacttggtggatgtgcttcacttggaattccccggcaacggcgccagaaattcttccagctacttcccagtcacgtcaccagaacttggcaatttgactcgagattgcgttggttttgcccttgaagaggaaagggtgatgtagcacagcaacaacaagtatttccctcagtttgagaaccaaggtatcgaaccagtaggaacttcaagataaagttccaagtgacctacacaaaaaacagcaacttgcacccaacgcgacaaaggggttgtcaatcccttcacaattgtttgcaaaagtgagatctgacagagaaagtaatatagatcggaaaacagtagatggaaaatagacccgggggccatagtgttcactagaggcttctctcataaaagcaaatatcacggcgggtaaacaaattactgtagaggaattgatagaatcgcacaaagtcatgaagtcatctaagcaatgatcatgcatataggcatcatgtccgagacaagtagaccgatactgtcagcatctacttcttattactccacacatcgaccgctatccagcatgcatctagtgtattaagttcatgcaaacagagtaaagatttaagcaagatgacatgatgtagagggataaactcaaaccaatgatgaaaaccccatctttttacacttgatggcaacaacacgatacgtgcttcgctaccccttctgtcactgggtgaggtcaccgcatggtatgaacccaaaactaagcacttctcccattgcaagaatcatagatcaagttggccaaacaaaaccgataactcaaagagaattacaaggatatgaaatcatgcatataagaaatcagcaaagactcgaaatatatcatagataatctcatcatgaatccacaattcatcggatctcgacaaacacaccgcaaagaagaattacatcggatagatctccatgaagatcatggagaactttgtattgaagatccaagagagagaagaagccatctagctactagctatggacccgaaggtctgtggtgaactactcacgcatcatcggtggggcaatggtgttgatgtagaagccctccaactccggatccctctcggcagagtaccggaacggtctccagatgggatctctcggaagcagaggctctctttttttccgtggcacaatttatcggaatttataggcggaagaagtagggcaccgaagccacgtggggcccacgagctcccacggcgtggccaggggggcccgcagcctgggggctcgtggcctcccatggtctccgctgccattcttcttattttcggaaaaaatcatggcaaaagttttattccgtttggactccgtttgatattcctatctgcaagagttcaaaaacaaggaaaaaacaggaactgacactgggcactgagttaataagttagtcccaaaaaagatataaaacatcatagaaatgcatagggaacatccaaagttgatactaaaacaacatggaacactacaagaaatctgttaatacgtgacgatactaatccgtcacaggtgatgcgaaaactgtcatgggttgccatacatgacggatttaaaatatgtcatgtatcatgcgtcataatttcacatagagtcgtccatgacggatcttggctgtcatggctgtaccacaggcccgcccaaggcccaaagcttcatgacggaacaaaaccatcatgtatcgatgccatgtcggatttccaattaaccaactggaatgacatggcagcttacgtggacactgattttcgtcacagaaatcgtcataggtattgacagaatttaaatttagtttgtctcattagcctatttttttaagtccaattttcatgtacatttttaaaaataatgcattacacaaatcgtaatgccaattttggcaagggaaggtattaagtgtcatacatgcacatatgaatcaatatattgtcatccgcaagtatgtacaacatatcagtttacaaaatctgccacgaaatgataatttacaacatatatttccaaaatatattaatcaacaaattaggaagcaatacaatcttttcacacaaacagaacatttaaactattcaacttgttttcttgtcatcagtcctcctgatggagattatcatgttgtgcgaattgtgatgggcagcaccacgtatcccaatacgacatcttacctagaatatttaaataagaaacagaagaaaaaacttgtcagacaaagggatacaatacataatgcagtgcgcaagattcattcaattatcatatgtccagtgaccctttatgaagttatgaagattaataaattatcatacaattataatactccctccgtcccaaaattcttgtcttaaatttgtctggatatgaatgtatctagtcacattttaacatttagatacattcatttatagacaaacctaagacaagaattttgggacggagggagtacaagattcattcaattatcttacacacaagcttcattcagttatcatatgatcaatgcacaagatagctgtgcgttaagaaacaaggagctacttctacagttatctagtagcactaagaaattggatataccctgaagaataatattcacatattgttgacacttgacagtgaaaacttagaacaaaaaaagatatatagtgaaaatagaaccaacaggctatgaaggggacagtaatggacctatgtaagaatgtcgacattttgcccaatgatacatttcttttgcaaccataagaaatcatcaataattatcaagcatacaactatttgacatgaacaataataaaagaattgataagtggcgacgcaaaattaccaccaaaagttaggtgatgggtttctcaacagcaaggacaccgccatcaatagtattaatgcgatggaagtggagcccaaatacaatctatagcagaaggatcggcatcataaacaccacttacaagtagcgaggtgcacatcaatctcaacaccaaaatccaaagttccgcagtaccatcctaaatgtccaaccttaggctccataaatctaggtgttgagaaatttgcatacaaaatctaggtgtccatgagatattagacacgtgaaaagcatctaacagaagttagcatactcttaacacctttaggatttacacatacaagaatttcaccggaacccaaagtgcaatgacaacaacaaatattattatgtatcacatgtacgaacatatgtaggaatttgttttatggaataccgaccactccttaagctaggcatggtcaaaactaacaagtactacctctatctcaaaatataggcatggtcaaaatttatttcatagagatttttttactaaatgtaagaattgctatgttatcctaatagaaacaaaaatgagtacatcttacttacacaggttctgcattaaataaaaattgcactctggtatactataccagacaaccacttctcagtaaacaacatacacattgttaattatttgtctgcaactatgtcagagagtaaaatggtagttaatattaaaatatagatatatgccagactagtaaaaaggactagcatcgtgtaagttttggttagggactaaatgtcaaccatcacacagcttgtctaactagtagctgcttaactagttaatagatctcacaaaatttggactgctagtgctctcacggaatagctagcagtgctagtccatcgttgactgtaacctgcgagtatcagtaaactatcgtgggcagtgctagtctagcagtgcttggtcctgtactaggccatcgctcctccacaccggcggatgcaacatcatgctgggcgacttgtgcttaggtgccacctccctcgccatgcccctctacatctgatctgggcagctggtctgaaactgaaaatacaaccttttttctaatgattcatctatccatattgacccaaatcttataatccatattggaaagttagtttttgcatataacggaccaatctagcttcttgggtgtatttgtataatacgtcaacaagtgtgatcgttgcttgcctgcaaaaaagggctcacttattttgtttcaatcttttctgaagttcactaaaccaagaataaccatgacgccttcatcaggttcagtcccaggagaactatgctagagcagagcaacaattacttgaaaagaaaattaaaaagaggggtaggatcgaccttcttgttccgtgaggaatcatggtgcacggggcagatgacctcactttcaagctcatctaactcgtcgggcgtgaggatggggctgatcgttattttccatggaactggagaggcagagtgctgctgctgatctgaatcgaatcaaaaaatcgattggggatgtgattgagagaaggaatcactagtggaaaaatggcctttggcctggacctttagtcccggcctccatctgggccgggactaaaggcccggccacgtcgccccataatcccaatgccgcccacgaggctttggtcccggcccgtaaggagcctttagtcccggtttgagacacaaaccgggactaaagggctacgcggtgtgcagcccgcatgtgcgccacctttagtcccggtttgtgtctcaaaccgggactaaagttccgcctatatataccgtcgcccctgccaacactctcctctgttttttggctgaagtgtgcccatgccatatgccacccttgccgctctagttcatgcacttgacgtgtttgatgaaatgcccaagccacactacttaagctttctcctcttcaagctcgacctccaaactccattttcctcaatatttgtctaggtttagccgtgcaccaactccacaagtgtttcaaaaggttagctatacttcgtctgtcactgcttgtttagctcatttcaaatgctcaaattaacttcttagagtctgcacatataggctgctgtcccgtgtccgtcctcaccgttgtcgatcgcccgcgccgatctcgttgcgagcaccaccgtggtgagcctcttgttcttatcttctatttaaaagatcaatatttttttacttgtatgatttagatacacacttgtataaattacttactttttattattattattatatagtgcgatggttttggtatccgcctccgtcggacctcatcctgtctatgattcggatgtggtatatattatcttttataactatttgtcttatttagtgtttatgacaattatgacgaccaacgtgatatatttttaatctaggaggtatgtgaaccggaaattccaaccgacctagaaatgcttctcgagaagttaactttggttgaaaaagaaaacaaatacttgaaggaaaaattgaaaataattgaggagaaaaataaggaaatggagttgcatgttgccgaggtcattgacgatcgcaacatgaagatcgatgcgatgcggttgaagatggatgcaatgcgcttgaagatggatgaaatgtgcttgaagattaggaatattagaaaatatgccattgataaagaggcttggtatcattatgctgttgggtcaattgttaccttagttgcgattttgatcacgtttgttgttgcatttaaatgttttacatagttgtatgttgttttatgagagaacttaatgtatttatttttcaataataatatttgatcactattgtgcttggttttaatgtgattttcgtgtccttcgatgtcgaccacacacactatcaagatagaggtgctctcctcagacgacgaggttgtcaaggactagtggaaaacgggcatttggcctggaccctttagtcccggcctccatctgggccgggactaaaggcccggccacgtcgccccaaatcacaatgccgcccacgaggctttggtcccggcccgtaaggagcctttagtcccggtttgtgtctcaaaccgggactaaagtcctctgcctatatatattggccacagcccccctctcccctcttcctctttatttctacttattctaaaaggttatcaactatatttccttgtttagaccgtgcggtactaatttttaggatcgtgattgtatttgatatactgtcgtataacgcagatgagccatccatggatgtacggtgatcgacgcacagccgcttacagagaaggcgtgcattcttttcgagatgcagccgatgcgaacaagcatggtggtggctatatgttttttccatgtgttgaatgttagaatgagaaggattacacttcctcaagagtcattcagagccacctacttcggtctggttttatgtcgggctataatgtttggaccaagcacggagaaagacgggttatgatggaagacgacgatgaagaagaagagaacgatgatgacaactaccgatttatgttccctgggtatgctgataccgcaatggaagacaatgaagaagaagatcaggatgaagaacgggaaccagatgagcccgctgatgatcttggccgggtcatttctgatgcacggcgaggttgcgacacagaaaaggagaggttgcagttcgagcagatgttacaggaccacaaaaaattattgtacccaacttgtgaagatggccagaagaagctgggtagcacactggaattgctgaagtggaaggcagagaccggtgtgactgactcgtcattcgaaaagttgctggtactgatgaagaagatgcttccaagaaagaacaaattgcccgccagcacgtacgaagcaaagaagcttgtctgccctctaggattagacgtgcagaagatacatgcatgccctaatgactgcatcctctaccgcggtgagaagtacaagaatatggataaatgcccggtatgcactgcattgcggtataagatcagaaaagatgaccctggtgatattgagggtgagccacccaggaagagggttcctgccaaggtgatgtggtatgctcctataataccacggtagaaacgtctgttcagaaataaagatcatgcgaagttgttgcgatggcacatggaagatcgtatgaaagacgataagttgaggcacaccgctgatggtcggcagtggagaaaaatcgagagagagttcccgagatttgcaggtgacgcaaggaacttatggtttggtctgagtacagatggcatgaatccttttggggagcagagttgcagtcacagcacctggcccgttactctatgtatctacaaccttcctccttggttgtgcatgaagcggaagttcattatgatgccagtgcttatccaaggtccaaagcaacccggcaacgatattgatgtgtacctaaggccattagttgatgaacttttacagttgtgggccgaaccaggtgtacgtgtgtgggacgagcacaaacaagaggaatttgaccttcgagcattgcttttcgtaactatcaatgattggcctgctcttagtaacatttcaggacagtcaaacaagggatacaatgcatgcacgcactgtttggctcagacagaaagtatatatctggacaaatgtaggaagaatgtgtacccgtacaatcgtcgttttcttccgcccaagcatcccttaaagaaaaaaggcaagcatttcaatggcaaggcagaaccccgggggaagcctgtcatccgtactggtgctgaagtatttgatatggtcaaagatttaaaagtaatctttggaaagggtcctggcagccaacctgttcctaatggccctgataagcgcgtacccatgtggaagaagaaatctatattttgggagctaccctactgggaagtccatgaggtccgctcggcaatcgacgtgatgcacctaacgaagaatctctgcgtgaatattgtaggcttcctgggcttgtatgggaagtcaaaagatacaccggaagcacgggaggaccaggaacgtcataaaggaagagatggcatgcatccagggcagtttcaagggcgtgccagctacgctcttactaaggaagagaaggaaatcttctttgaagtccttttcagtatcaaggtcccgactggcttctagtcgaatataaagggaatcgtaaatatgaaagacaaaaaattccaaaacctaaagtctcatgactgccacgtgcttatgacgcaattgcttccggttgcattgaggggaattctaccggaaaatgttcgcctggcaattgtgaaggtatgtgcattcctcaatgcaatttctcagaaggtaatcaatcgagaaagtctatcagggttacaggttgatgtggtccaatgtctggtcagctttgagttgttgttcccgccatccttcttcaatataatgacacacctcctagtgcacctagtcgaagagattagaattctcggtcctgtgtttctacacaatatgttccccttcgagaggttcatgggagtcttaaagaaatatgttcgtaaccgtgctaggccagaaggaagcatctccaagggctatggaacagaggaggtcattgagttttgtgtggactttcttcctgaccttaagccgattggtgttcctgaatctcggtatgagggtaggctgacaggaaaaggcacactaggaaggaaagcaaaagtatgtatggacgggcattctttctctcaagcacactacacagttctacacaattccaccgtggtggctccgtatatcgtgagacacaagaatattctacgctccgaaaacccggggaaggctgactcttggattaaaggggaacacgagaagactttcggcagttggttgcagacacatctcatgaatgacgacaccgttggagatcagctgtactgtttggccaggccaccatcttcgactatatgtactttccaagggtatgagataaatgggaatacattttacacggttgcccaagataaaaagagcaccaaccaaaatagtggtgtccgctttgatgcaacagacgagaatgggcactgtttggaaacatattacgggtacatagaggagatatgggaacttgactatggacctacttttaagatccctttgtttcggtgcaaatgggtgaagctgacaggaggcggggtagttgtagaccaaaagtacggcatgacaacaatggatctcaacaatcttgcgtacatggacgaaccatttgtcctagccaatgatgtcgctcaggttttctatgtgaaggacatgtctacaaaaacgagaaaaagaaatcagcaaaagaagatatcgtccgatgagccaaaacatcacataattctttcagggaaaagaaacatcgtgggagtagatgaccagacagacatgtcagtagattataataagtttcatgaaattccgcccttcaaagtgaaaactgacccaagcatcctactgaatgatgaagattctccatggctacgacccagaaaaaaacagaaataatagataggaatattggtgcaataatgtaataatgtattaaaccttttatgtaatgcatgtatggaatgtactaaaccttttagatgagttctcgttcgaaacgctgatacttcgagagagattgtccgttttgtacacgaagtgcatccagtttttgtcgtagccctatcaactttttaacacatgctatgtgggtgaaatgatgatagcatgccaactttcaacatcttcagagttcatttgtagtgcttttcaattttagggtcaactagcccaaaaaacaaaagtaaatgcacgaaaaataccaaatgaagtcagaaattgttgaaattttgtgatgtgcctttgaatggtgcattttgaacacacaaaaagtatggagttcaaataagttcaaaaaaatgaaatccctttgtaagagatgagttctcgttcgaaacgctgctacttcgagagattgtccgttttgtacacgaagtgcatccagtttttgtcgtagccctctcaactttttaacacatgctatgtgggtgaaatgatgatagcatgccaactgtcaactttttcagagttcatttgtagtgcttttcaattttagggtcaactagcccaaaaaaacaaaagtaaatgcacgaaaaataccaaatgaagtcagaaattgttgaaattttgtgatgtgcctttgaatggtgcattttgaacacacaaaaactatggagttcaaataatttcaaaaaaatgaaatccctttgtaagagatgagttctcgttcgaaacgctgctacttcgagagagattgtccgttttgtacccgaagtgcatccagtttttgtcgtagccctctcaactttttaacacatgctatgtgggtgaaatgatgatagcatgtcaactttcaacatcttcagagttcatttgtagtgcttttcaattttagggtcaactagcccaaaaaacaaaagtaaatgcacgaaaaataccaaatgaagtcagaaattattgaaaatttgtgatgtgcctttgaatggtgcattttgaacacacaaaaagtatggagttcaaataagttcaaaaaaatgaaatccctttgtaagagatgagttctcgttcgaaacgctgctacttcgagagagattgtccgttttgtacacgaagtgcatccagtttttgtcgtagccctctcaactttttaacacatgctatgtgggtgaaattatgatagcatgccaactttcaacatcttcagagttcatttgtagtgcttttcaattttagggtcaactagcccaaaaaaacaaaagtaaatgcacgaaaaataccaaatgaactgagaaattgttgaaaatttgtgatgtgcctttgaatggtgcattttgaacacacaaaaagtatggagttcaaataagttcaaaaaaatgaaatccctttgtaagagatgagttctggttcgaaacgctgatacttcgagagagattgtccgttttgtacacgaagtgcatccagtttttgtcgtagccctctcaactttttaacacatgctatgtgggtgaaatgatgatagcatgccaactttcaacatcttcagagttcatttgtagtgcttttcaattttagggtcaactagcccaaaaaaacaaaagtaaatgcacgaaaaataccaaatgaagtcagaaattgttgaaaatttgtgatgtgcctttgaatggtacatttttaacacacaaaaagtatggagttcaaataagtttaaaaaaatgaaatccctttgtaagagatgagttctcgttcgaaacgctaatacttcgagagagattgtccgttttgtacacgaagtgcatccagtttttgtcgtagccctctcaactttttaacacatgctatgtgggtgaaatgatcatagcatgccaactttcaacatcttcagagttcatttgtagtgcttttcaattttagggtcaactagcccaaaaaaacaaaagtaaatgcacgaaaaataccaaatgaagtcagaaattgttgaaaatttgtgatgtgcctttgaattgttgaaaatagttaatagcttataaaaagaaacaattaaaaagaatgaactaaaattatcaaagtgttttatttgtaaaaaagaatcaagtaaaccattaactaaaaaaaaaatcaactcaaaagaatcttcataaagttctttttgttaaaatcttgaatagaaaactaaaataaaagagttggagatgctctcacttaatagctaatagtttttaataaacatagattttaattgaaaataacaaaatagttaatagcttataaaaagaaacaattaaaaagaatgaactaaaattatcaaagtgttttctttgtaaaaaagaattaagtaaaacattaactaaaaaaaatatcaactcaaaagaatcttcataaagttctttttgttaaaatcttaaatagaaaactaagataaaagagttggagatgctctcacttaatagctaatagtttttaataaacatagtttttaattgaaaataacaaaatagttaatagcttataaaaagaaacaattaaaaagaatgaactaaaattatcaaagtgttttctttgtaaaaaagaatcaagtaaaacattaactaaaaaaatatcaactaaaaagaatcttcataaagttctttttgttaaaatcttaaatagaaaactaaaataaaagagaaaaaaatctttaatagcaaagaattaaaatataaactaggactaaaaattattaaagtaaaaaaatgccgcctcacggcctgcatacgattagaaacccacccacaggtgggccaggatgcaggcccgcgggcccacaggcaaagagaggatagttaggcccataggcctgcattgagaggagctcaacgcagcgggcacggcctaggcgaggtgggactaaagttgcaggcggagccagcccaggcctttagtcccgggtcgtggctcgaaccgggactaaagaccccctttagtcccggttcgagccacgacccgggactaaaggccctcaccttcccgcctctccgcctgccgaaaaggcccctttagtcccgggtcgatccacgacccgggactaaagggtgtctttagtcccggttctagccacgaaccgggactaaagctccacctatataagcgggactttgcaaatttccgttccaaatcttcttcctctcgttctttcttcctgcccggcgcggcatcgcggagaactcctcgacgccgccaggctgccggacctccgcctcgctctcgccgtcaccctgccgtcctcctcgccgtcgccgtcgccgccgtcgccgccgtcgccgtcgccgccgtcgccgtcgcgcctgctccacgaactcctcgccgcgccgccgtcgccgtcgccgccgtcgccgccgtcgcaccgctgtgagatcccccggccctctcccctatccctcgccgtcgccgccgtcgccacacacacacacacacacacacacacacacacacacacacacacaaaatctgtattttttgtatatatattataacaactcaagaaaaacacacagagcacctgcgatagaatatgtttttcaaggcaatacgatgtgtttttctagctttttgatctgttactgtaagaggcagatataaatggatctttctagaatatgtgttagcaaaagtatgtattgttctccgaattccctcatgttattcttagtgctgttaaaaagtcagttaaattcagtcaaaagtttgctctattatctctccttggatctcttcctatatttttgcttgcgatatctgttgttgtacagatttagtgaaggtttcttagatgaaatcatgtaatagtatggttgctcttgtttttctatctatttttgaattcagtagatgtgtagatttagagaagtaaagtagttcagtatagccatttctctcagagagaattgcatgtgtaagtgtagggctgaccttttcataggtagcacccatagtttatcttcagaaaatatactttttatataggatcaaactgagttcagtttagtttagttcctagtttatttttagtaagtactactttattttatttatagtaagtgattcatatatagttgaactagctagttgatttaataaactactttattttactatatatagaagtagtttgtttttagtaagtaatactttatttatttatagtaagtgcttagtagttgaactagttgatttaattaataaaactactttatttaactatatatagaagtagttcccgcatcgacgtcgacttgttatattgtcttcatatatagtgtgtcacgattatattattgtttacacacatttaccacatgaaaacaggaaatgtctgacgatggatattgggagtgtgaatattgcggcgactctcggggtatgtgcgacatgcctcacctgcgagacgataggttcttcagcatgaagcttgacgagaacggcgatatgtacctcccttgccatgcaagaagatatgtgttggagaggctcggtttcgaagaccacgagagaattgagacgaggagcgctaagctgaggactatacatggtcacacatttgttatccaagtatttaattcagtttttcaaatagaatttgggtgcccaaagtgggaagatctttgcaaggcatatggatttcagaagggaatggaaatcaccttcgatcttcgtcctgaagataatatgccagacaacatcgacatttgggtggttgtcgatgatatgcttcctgttttacctccatgtgagtttctcaaccatatttgttaagtaatttgcatttatatttataaatagttggtgtagtcaacctgttttcctctcgcaatttacatgtcatgtggtgttcatcgtctaataaaactttggccacacgttgcaggttcctagttattgggccatagttataattatatcatgttacatgttgtacaaacaacaacaacaacccaaattgtcctttgaatgatcgtagcacatgtggtcgttttgaatggtttatataatgcccacatcttgtggacaattacaaaatttctaagtatttttgaaacattaaattattacaaaatttgggtggttgtcgatgatatgcttcctgttttacttccatgtgaagtaatttgcatttatatttagaaatagttggtgttcatctatatactaaatttgttaaattataatttacagcttatttcgttgcttcgactgaattacgaaaattaattgacacgacacactacacgtatggatcatatctaacttggaaggagaaggatgatcttctccactttcttgttgctggtgttctggcttctagggataccttcccgtatcattttggaattggccaaaattattcattttacatgccactagtgcataggttgagtccagatgacattcgccgaaatgtcttggtaagagtttcctaattaagtacgctccactattgcataaatggtgttgattacattgctaactaggttattgttatgttcttcaacagtaactgccacatgatgtagtgcctccgttaatggacccagaaggtcaaatgagaattagaagcccgctgagggctgagttctatgctccatacttgattaacttcaaatcaagatcaaaaagactccaaattgaagcatggagagaaataaagaagattcgcaagccacaagctggagaccgttggatctctgtgattcatcatggagccataggtcttattctgttttatgacattatatctaagagcgaggactaggtcttatgagagacaagttattctagtttacattattacttgacatgatcgatgataacttggtatatgattatatatattaggatgcatgatgcatatgatgactatatatatattatgatgtttctctgttttattttatgtgtatcatatgataacttggtatatgattaagttgatgatgagttgttagatgatcgattagaatactattgccattcgacgaaaatgatatgaaatgatatagtgtaaaaaagatgcatatatgtgcatgtaactcgtgtctacattttgtaaatatgttcgacaaagcacgacggatgaccaagcacggagatatataagagaggacacttttctctattaactagctaataacgaggcatcacgttaatctcccgaacacctaaaaccctaaaaccctaaactacacaaaatctaaaaatctgaagaaagtctttagtcccggtccgtgttacgggccgggactaaagggcctgcccctgagggcgctccgaggtgcccacgtggagcaactttagtcccggcttggaacagggccgggactaaaggttaggcctttagtcccgcccctttagtcccggttggtgaaccgggactaaagccccttacgggccgggactataggccctgtccccactagtgaatgaaggagaggagacagagggagttcgaagggaccttgtgcgggccgtcgtcgttgcgagcgaggttgagctcgagctgccgcgggtcatagttgtcgtcatctcctcgtccggggcttactgctccaaatcttcggatggcaaggcagctacgtggcctgggacatggaggatggagtaccctgccacagatctatggccctcgttgtttattgagagcatcagaggtgcgccgcggctgctagagttggttgccgcttctatcgggccactgcagcgaccgtcgccatggatctcgggccgcaatcatccggtgtagacagggaggtggaggcggaggacggggggaggcaaaggtgtggcggctgtggatggagaaggagactggggacgggagtgtgttagggttaggttttatacggggaaaattttagggctttaggtgggcttgtggggttgtactagccagtcatgacggatttcgaaactgtcatccaaaatccgtcatgcattaacaggttttttgtagtggaacactcaaaaattatagatacgttggagacgtatcattgcaccagcccatagatggagcgctggagcttgcataccttgttagtactcttaggatctacaaaaccttctggttgcatcatatacaactcctccttaagataaccgttaaggaacgttgttttgacttccatttgccaaatttcataatcatgaaaaccggcaattgctaacatgattcagactgacttcagcttcgctacgggagagaaagtctcatcgtactcaattccttgaatttgtcaaaaatcctttgcgacaagtcgagctttataaacggtcacgttaccgttcgcgtcagtcttcttcttaaagatccaattattttctatggctcgccgatcatcgagcaagtccaccaaagtccatactttgttctcatacatggatccgatctcggatttcatggcctcgagccatttgttggaatccggaccctccattgctacttcatagttcgaaggttcaccgttgtccaacaacatgaactccatcacagggttatcgtaccagtctggtgcggaacgtacccttgtggaccttcgaggttcaatagcaatttgatctgaagtttcatgatcaccatcattaacttcctcttcatttggtgtaggcgccacagggacattttcccgcactgcgccatgatgtcagctatgcttcccttgcaacggcgccaagaatagtcttgtcgacggcaccaggaatccttctgctacggctacaccttaagggacttcctaggcaaatatgcaaaggatttcccccgtgggcttggagccttgcgttggtgttccctcgaagcggaaagggggatgtagcatagcggtggtaagtatttccctcagtttaacaaccaaggtatcaatccagtggaggagtatctcaagatcctgcacaaacacaaaagcttgctcccaatgctatgaaggggttgtcaatcccttatagattgtttgccaagtgagaacagaaagcaacaaagtaataaagcaaagtaaaagcggagatgtaaacgatggatgtgaatagacccgggggccgtagtgtttactagtggcttctctcatgaaagcaagtagacggtgggtaacaaattactgtcgagcaattgatagaacagcgcaaagtcgtgatgatatctatgcaatgattatatctataggcatcacgtccaaaacaagtagaccgatactttctgcatctactactattactccacacgtcgaccgctatccagcatgtatctagtgtattaagtccataagaacagagtaacgccttaagcaagatgacatgatgtagagggataatctcaaaccaatgataaaaaccccatctttttacccttgatggcaactacttgatgtgtgccttgctgcccctactgtcactgggaaaggtcaccacatggtagaacccaaaaccaagcacttctcccattgcaagaatcatagatctagttggccaaacaaaacccaagactcggagagacttacaaggatatcaaatcatgcatataagaaatcagcaaagactcaaatatatatcatagataatctgatcacaaatccacaattcatcggatctcgacaaacacaccgccaaaggagattacatcggatagatctccatgaagatcatggagaactttgtattgaagatccaagagagagaagaagccatctagctactaactacgaacccgtaggtctgaagtgaactactcacgagtcattggaggggtgatgatgatgatgatgaagaagccctccaactccagagtcccctccggcagggcgccgggaagggtctccagatgatatctcgcggaaacggaagcttgcggcggcagaaaagtattttcgaggctcccctgattttttacttaatatttgcgaatatataggccaaggatctaggtcagggggcggccagggaggccacaagccctgccaccgccgcctcccccctgggggcggtgtgggagcttgtgggctccctggagcccacctggcttggcccagaggccccctgatcttctttcgttcgggaaaaaatcatttcggggtttttattccgtttggactctgttccaaaatcagatctgaaaagagtcaaaaacacagaaaaacaggaactggcacttggcactgaattaataagttagtcccaaaaaagatataaaaggtacataaaacatccaaagaagacaagataacagcatgaaaccatcaaaaattatagatacgtttgagacgtatcacgctactctccggttcgagaggaggtacaactacctcatcaagttctactttcctcccacttacttctttcgagagaaactctttctctagaatggatctgttcttggcaacaaagactttgccttcggatctaagatagaaggtatacccaatagtttccttagggtatcctatgaatacgcatttctccgctttgggttcgagcttttctagttgaagtttcttcacataagcatcgcagccccaaacttttagaaatgacagcttaggtttcttgccaaaccataattcatatggtgtcgtctcaacggatttagacggtgccctatttaaagtgaatgatgcagtttccaatgcgtatccccaaaatgatagcggtaagtcggtaagagacatcatagatcgcaccatatctaataaagtgcgattacaacgttcacacactccgttacgttgcggtgtgccaggcggcataagttgtgaaacaattccacatttccttacgtgtgtgccaaactcgtgactcaaatattctcctccacgatcatatcatagacactttattttccggtcatgttgattctcaacctcactctgaaattctttgaacttttcaaatgtttcagacttctgcttcatcaagtagatatatccatacctactcaaatcatcagtgagagtgtagcgactcgacctaaaaatggctaagtctctggtgtttctgtaccatcccaagatcatgctggtacacacacaatacatcaatgtatatatcgagagttcaatcacacagctttattaatcagatctcatatcgagtactttattacaataatgattacaataaagaggctgaaggccaaactcatgatataactaacgaagactagcggaagcatcaagtagtagagtccatctgactccagggcatatcaccgagcgtagatcgtgaccccactcctggtcggaatagtactctgtaacatgacacgttgcaaccgtgtaggtcagcatattgaatatgccggcaagtcaccaaagagaggggtgaaaatagtaatcatctatactatatgcttatatggcaggtggggccataagtttttagcggaaagcaaagttttctcctacaacaagagagggctaaaagcaaaatattactacagtgttggttgttaacgagatggttccgccaaccaattctcgtacctgagttgtcaataatacccacatcattattaaattgtgttgagagttctggaaaatttcaattcctttggctcaagttgtccatgaccgtggacacggctaatcgattaggtttgggtactctgcagagttttgcacacgttccccacaagatttgatcgcctccgtgtatgtcctcgcacttcagggtgtttgaagaccggatgatcaaaacatggtctttcaacgggtccctctgatcctctgtcggtgcccatccaatcctactgttcttctacatctcgtagcaccgcctgtccagagtcatcgcgttgtccaaccaagccagagcccataatgagctgtggctgtgcaggtaagccttgggtcttgaagcctccgtccatctcttcgagcctgggtgaagctttccgcaagatgtcatggcgcttctccatgcatcccgggtcatccactggtttccccagggagcccatctaaaccgtccttcacccagatttgcattgcatcacgaggtcttgaaaagtcttgaattaaccggtcttgattattaaaatattctcgcatcactcgtgatagactctcaaccaaaaccccgtctacttaagcatagcaaaatagaattcgttgtcccgggccaaataacagggttgttgggtgcctaccacatgatactataacaagtaaccataatttccaagtacctactcagcatgcaattgggtgaagaaagatagaactacaatgcatggaaaaacataggtaatagtatgatcaacgtgacttgccttgctgatagttgtcgtgatcaagcacttgtaggtagcaagtttcgcactccggatgatctatcgatgcaaacaaaatacacacaataagcactacaatcactaactatcaaaataaaatcactaacatataaacactataacacaaggtgttgaaattcattttacctaaccaaaacagaatctgtttttggtaaaaccccaagtaacaaatatttaaaaaaaattgaaacttaaactgctgaaagatattatcactaggaaagagtagcaaaaagaattaaattaaaagctattttgaaactcccagaataagcaaaacaaggtttaaactaaatctgttctaattcaaatttttaaatttcaaacataggcaaataatatgttttcggaaactacaagaaaattgtgatctactgcaagaataatcaactccattggagtcctagattaaaagatataaaggaaacaaaattgaaactggttctgtttttgaaattaaaacagaaaaagaaaaactaacctaacgaacagggcctgcgtggcagctcctcattggtcaggggtgggcgctgcggtgacttagctagcgaacggccgcaattaaacaaaccgctctcggctaatattaagtgaagaagaaaaccgttcggtttttatctaaaaaccgaaggggtatcggtgatctaatcacgtgcgcacatccacgatccaacggctacagttcaagggggaagctcaccgtggggggctgccggtgttgctctgctccggcgaggccgagacgaggtggtggtcggggcggcgattccggcgggtctcggcggtgtccgagggtttggggacgtggcagcgaggctcctgcgtcctctggtggcgacggcgaggcgagaggggcgccggggcgagcaggggaagctcggagagcttcggctacaagccgaactctggcgaggtggcggggtggcgtgggggcgaggagcttcgggtttggggaggggaacggggtgcggaggggtaggggagtttatatagggggaggagagggctcgggagggaacgaggagggagatcgggagaggagatcggccggctccggcgagggaaagtgatcggggctggggaaggaaagagagggataaaggaggaaggcgaccagcgaggagatcgggtcggccagtgggcccgggtggtcagagagagagagagagggcgaggccgcggcggttggccgatccgaatgcagatcggatcccggctaaggggggatcggcccatgccactaaaggacgctcgggcgtttttccaaaaatgaaagatttcctattttttttaaaactgagaataaaacaaataaaaaggcaataaaataaaatcctaaaataggggtattatataccaaaattttcagaaaaataaactctacacgtttaacatttttccaaggccaaaataaaaactttaaaaaatgttttttcaaaaaatccctaaaaggtttatttctttttaaaatatttttctcaatagaactttggttttcttggctcaaaatatttcaaaaatcccctggttttggagggtcatgttcctcctctcattcttgtttagcaagaatttattcccggcatttcttgagtgggaaaaaaatagaaatgcaaacccaaaaatcgaaagaattcaaatgccagctttattacaatcaatatgcatagatgcttagctacaattgtaaaacattccaaattaggaaatttgggatgttacaaacctacccaccttaagatgaatctcgccctcgagattcgggttggctagaaaataggtgtgggtggtctcgacgaagatcctcttctcgttcccatgtggcttcttcctcggtgtggtgactccacaaaaccttgcaaaacttgatgatcttgccgcgagtaactctattggcagtctcgagaatcctgacgggtttctcctcataagtcagatcacggtcaagctgtatggcctctaggggcactgtatctctcaacggaacatcagccatctcagcatggcatttcttcaactgggaaacatggaagacaacatgaactccggacaatccttccgggaattccagtttgtatgcaacttcgcctctatgttcaagaattttgtagggggcaatgaatcggggtgctaactttccttttacaccaaatctcttgattcctcgaagtggagacacccgaaggtacgctcagtctcccacttcgtatgttacttccttgcgtttgctgtcagcataactcttctgtctggactgagctatcttgagtcggtcacgaatcagcttgaccttctcttcagaatctcggctaaggtcgggaccaaaaagttttcggtctccaacaccatcccacatcaatggtgttcggcacctccttccatataaagcttcgaaaggggctgatacgtctcaaacgtatctataatttttgatggtttcatgctgttatcttgtcaaactttggatgttttatatgccttttataacttttttgggactaacttattaattcagtgccaagtgccagttcctgttttttccgtgtttttgacccttttcagatctgatttttaaacggagtccaaacggaataaaatccctgaaatgattttttctaaaacagaagaagatcgggaggcttgagagccaaggcaggggagccccaggggccccacgagccccctagccgctgccagggggagcccgtggctgcctgtctcatgggccccctggccctcctctgcccaagctctttggcctatatattccctaaaatcatagaaaaaatcagggcatccacgaaaacacttttccgccgccgcaagcttccgtttccgcgagatctcatctggagacccttcccggtgccctgtcggaggggactttggagctggagggcttctacatcaacaccattgcctttccaatgactcgtgagtagtctagttcagacctacgggtccatagttagtagctagatggcttcttctctcccttggatcttcaatacaaagttctccatgatcttcatggagatctatccgatgtaatcctctttggcagtgtgtttgtcgagatctgatgaattgtggatttatgatcagattatctatgagtattatttgagtccttgctgatctcttatatgcatgatttgatatcattttaattctctttgagttgtgggttttgtttggccaactagatctatgattcttgcaatgggagaagtgcttggttttgggttcataccgtgcggtgacctcacccagtgacagaaggggtagcgaggcacgtatcgtgttgttgccatcaagggtaaaaagatggggttttcatcattggtttgagattatccctctacatcatgtcatcttgcttaaggcgttactctgttcttcatgaactcaatacactagatgcatgctggatagcggtcgatgtgtggagtaatagtagtagatgcagaaagtatcggtctacttgtctcggacgtgatgcctatatgtatgatcattgccttagatatcgtcatgactttgcatggttctatcaattgctcgacagtaattcgttcacccaccgtctacttgctatcttgagagaagcctctagtgatcacttttactttactttgctttttggtttcagttctcactttgcaaacaatctataagggattgacaaccccttcatagcgttgggtgcaagctctttgtgtttgtgcaggtacttgtgacttgatgcgatcctcctactggattgataccttggttctctaactgagggaaatacttaccgccgttgtgctacatcaccctttcctcttcaagggaacaccaacgcaaggctccaaggccacgggggtatccttagcatatttgccaaggaagtccctataggcgtagccagcggcagaaggatttctggcgccgttgccggggaggatcaagtcaagatcttatctaagtaagtgtcacaaactcatctcttgcatttacttttatttgccagttgcctctcgttttcctctcccccacttcacatttgctgttttcattttctgttttcatttgcctttttctttcgccctttttccgcctgtttttcttgcttgtttgtgttcttgtttgcttgttgaagtcatcatggttgaaaacaccaaactttgtgacttctcgaatactaatataatgattttattagtactccgattgctcccgccactagtgcggaatcatacaaaatcaacgctgccttgctgaatcttgttatgatagagcaattctctggccttcctagtgaagatgccgcatcccatcttaataccttcattgagctttgcgatatgcaaaagaagaaagatgtggataatgatgttgttaaattgaagctttttccgttcttgttgcgagatcgtgtaaaaacttggttttcttctttgcctaaaaatagtatcgattcttggaataagtgcaaagatgcttacatatccaagtattttccgccggttaagattatctctatccgtaacgatatcatgaatttcaagcaacttgatcatgaacatgttgcacaatcttgggagaggatgaaattaatgattagaaattgtcccgctcatggcttgagtttgtggatgattatacaaatcttttatgctggtttgaattttgcttctagaaatatcttggactccgcctcaggtggaacgttcatggaaatcacattaggagaagctacaaaattcctagacaatatcatgacaaactactctcaatggcacagtgaaaggtcacctactagtaaaaaggtacacgctatagaagaaattaactcgcttagtgctaagatggacgagttaatgaatttggttgctagtagaagtactctcaatcttccttgattgagagtagcaacgctagcttggacgttaattttgttggtaggaacaattttggcaacaacaatgcttttagaggaaactatgttcctaggccttttcctagtaactcctctaataattatggcaactcctacaacaatactcttggaaatcataacaaataatcctctgatttagagagtaatatcaaagagttcatcaactcttaaaagattttcaatacatccatagaggaaaaactactcaaaatagacgatttggctaagagcgttgataggatgtctagtgatattgatgctttgaaagttagatgtgctcctcctaagatcaatttggatgaaactttaaaagctatgcgtgtctccatgaatgagagcaaagaaagaaccgcccaaatacgtgctaggcatgaatggtttaaaggggtgtgttcttgtgatgagaatctagaagatcttaaagtgcttggtgtgtctcccattaaatctttgttttctcatgtcaaacctattgatgatggggctggatatgaatccactttggttgaaaaatgccccaatgattcggagtccacctatcttgatgctaaaagtttggagagtggagtagaagaaatcaaaaccttgggtagtaattaaactaccactttggatttcaagggattcaattatgatagttgctccttgtttgaatgcatttccttgatggaatccattgcaaactctccacacacttatagccaaagcaaagcctttaccgatcatatcgtagatgctatgatgaaatctcttgaagagaaactcgaattagaagtctctatacctagaaagcttcatgatgagtgggaacctactatcaaaatcaaaatcaaaaactatgaatgcaatgctttgtgtgatttgggtgctagtgtttccgctattccaaagtctttatgtgatgttcttggttttcatgggattgaagagtgttcttttaatttgcatcttgcggattctactgtcaagaaacccatgggaaggatcaatgatgttattattgatgcaaataagaactatgtacccgtggatttcattgtacttgacatagattgcaatccttcatgccccatcattcttggtagacctttcctaaggactatcggtgctatcattgatatgaaggaagggaatattagatttcaattccctctaaagaagggcatggagcattttcctagaaagaaaataagatttccttatgaatctatgatgagggctacttatggtttgagcaccaaagatgactatacgtgattccatcaccttatgcctagctaagggcgttaaacaatagcgcttgttgggaggcaacccaacgaaattatcctttttcttttctgttttgtgttttcaacactttcataattctgttatgattgtgttttttgtgtttatttttgtgtttgtgccaagcaaagccgttatgattagtcttggggatgatcgtttgatcacgctggaaaagacagaaactttctgctcacgaaaataattttcattttttctatgagagcttttgagttgattctttttgctgctgattgctacgcaatttcttcaaactgtcgtaatgtttaagaatttgtgaagtaccattagtatacgaagtatacagattgctacagactggtctgtttttgacagattctgtttttgttgagttggttgcttattttgatgaaactatggatagtatcggggggggggggggggggggtactagccatggaaaagtgaaaatacagcaacccaacaccaacataagtagaattcaagtctactacagtaccaaaggaagtggtggtttgctttcttatactaatgatatcatgagtttctgtttaagttttgtgttgtgaagttttcaagttttgggtgatgttcttatggacaaagagataaagagtggcaagagctcaagcttggggatgcccaaggcatcccaagctgattcaaggataccaaaaagcctaagcttggggatgccccgggaaggcatcccctctttcatcttcaaatccatcggtaacgttacttggagctatatttttattcaccacatgatatgtgttttgcttggagcgtcttgtatcgtaggagtcttttattttggttgtgccacaatattccttgctgcacacctagagagagagacatgcactcaccgtgattttgtcgagcttcatatatatcctttgagttaggcaattcagctcacatgtgtttcacttatatctttagagctagttgattttgctctatgtgcttcacttagatcttttagagcacggcggtgcgtggcttggtagttggtttatgctatgaaagtagtcccaaaagtggtagttatccaaagaggatacgaaaacttccatcttcatgtgcattgagtagaaagagaagtttgattcctcgcaattagtttggagatgtggttgtggtaatattaaagttatgttagtagggtgttgtgaatctagagatacttgtgttgaagttagtgattcccgtagcatgcacgtatggtgaaccgctatgtgatgaagtttgagcatgattagtttattgattgtcatcctttgtgtagcggtcgggatcgcgcgatggtttatacctaccaacccttcccctaggagtatgcgttgaatgctttgttttgattactaataaagctttttgcaacaagtatatgagttcttcatgactaatgttgagtccatggtttagatgcactttcaccttccactattgatatcttctttagtgtcgcgcaactttcgccggtacataaacccaccatatagcctccctcaaaacagccaccatacctacctactatggcattttcatagccattccgagatatattgccatgcaactaccaccgttccgtctcatgacatgcgccaccacttctacattgccattgcatgatcgtaagatagccagcatgatgtttccattgatgacaatgccatgctagatcattgtcacggtacactaccgaaggcatttcatatagagtcatcattgctctaagttttgagttgtaagtgtgatgatcatcaatgatagagcattgtcccatgtgaggaaataaaagaggccagcgaagcccatttataagaaagaggccaaaagatgcccaccaaaaaaaaagaggccaaagagcccaccaaaaaaatgagagaaaaagagagaagggacaatgctactatctcctttccacacttgtgcttcatattaagcaccatgatcttcatgattgagagcctcttgctttgtcacgaccatataactagtgggaatttttgttatataacttggcttgtatattccaatgatgggcttcctcgaaattgccctaggtcttcgtgagcaagcaagttggatgcacacccactatttctccttaagagctttcacatactcatagctctagtccatatcttgtatggcaatccctactgattcacattgatatctattgatgagcatctccatagcccattgatatgcctagtcaatgtgaccatcttctcctttttgtctcaaaacctccaccacactccattccacctatagtgctataaccatggctcacgctcatgtattgcgtgagagttgaaaaagtttaagaaagtaaaggtgtgaaaacatttacttggccaataccgaggttgtgcatgatttaaattccttgtgcaaggattatagagcatagccagactataagattttgtagggataactttcttttggccttgttatttcgaaagttcatgattaccttgctaatttgcttgcagtattattgtttccacgtcaatagcaaactattgttttgaatctaacggatctgaacattcatgtcacataagaggagttacaaaggacaactatgccaggtagcatgcaacctcaaaaattcattctttatcacttccctactcgaggacgagcaggagttaagcttggggttgcttgatacgtctcaaacatatctataatatttgatggtttcatgctgttatcttgtcaaactttggatgttttatatgccttttatatcttttttgggactaacttattaattcagtgccaagtgccagttcctgttttttccgtgtttttgacccttttcagatctgattttgaaacggagtccaaacagaataaaatcaccgaaatggttttttctgaaacagaagaagatcgggaggcttcagagccaaggcaggggagccccaggggcctcacgagccccctagccacggccaagggggagcccgcggctgcctatctcgtgggccccctagccctcctctgccctagctctttggcctatatattctctaaattcgcagaaaaaattagggcatcgatgaaaacacttttccgccgccgcaagcttccgttttcgcgagatctcatctggagacccttcccggtgccctgccggaggggactttggggctggagggcttctacatcaacaccattgcctctccaatgactcgtgagtagtctacttcagacctacgggtccatagttggtagctagatggcttcttctctctcttggatcttcaatacaaagttctccatgatcttcatggagatctatccgatgtaatcctttttggcggtgtgtttgtcgagatctgatgaattgtggatttatgatcagattatctatgagtattatttgagtccttgctgatctcttatatgcatgatttgatatccttgtaattctcttcgagttgtgggttttgtttggccaactagatctatgattcttgcaatgggagaagtgcttggttttgggttcataccgtgcggtgacctcacccagtgatagaagggggtagcgaggcacatatcgtgttgttgacatcaagggtaaaaagatggggttttcatcattggtttgagattatccctctacatcatgtcatcttgcttaaggtgttactctattcttcatgaactgaatacactagatgcatgctggatagcggtcgatgtgtggagtaatagtagtagatgcagaaagtatcggtctacttgtctcggacgtgatgcctatatgtatgatcattgccttagatatcatcatgactttgcgcggttctatcaattgctcgacagtagttcattcatccaccgtctacttgctatcttgagagaagcctctagtgaacactatggcccccgggtctactcatcattataatttcagctttagacttttactttactttgcttttttgctttcagttctcactttgcaaacaatctataagggattgacaaccccttcatagcgttgggtgcaagctgtttgtgtttgtgcaggtacttgtgatttgacgcgatcctcctactggattgataccttggttctctaactgagggaaatacttaccgccgctgtgctacatcaccctttcctcttcgaggggaacaccaacgcaaggctccaaggccgcgggggtatccttagcatatttgccaaggaagtccctataggcgtagccagcagcaggggccatcttcagactggtctgatagctgttgttgtatgagaactcggcataaggcaaattgtcatcccagctagacccatagtctagtgcgcaagcactcaacttgtcctccagaatctgattgactctctcggtctgttcgtcggtctgagggtgaaaaactgtactgaactccaatctcgttcccaaggtttcgtgtagttggtgccaaaagtttgatgtgaactgggtccctctatctgaaacaatactcttcggtactccatgtagacatacgatcctggtcatatagatcttggccaccttagcactcgtgtaggtagtcttcacgggaatgaagtgagctaccttggtcaaacgattgaccacaacccagatagaatcataactagaacgggtcctgggtaatcctgtgatgaagtccataccaagcttctcccatttccactcaggtatcggcagaggttgaagcaatcctgctggcttctgatgctcggcctttactcactgacaaacatcgcatattgctacaaactcgacaatgtccttcttcattcctgtccaccagaaactttctttcatgtccagatacatcttggtgttgcctggatgtatcgagtacggggaatcatgggcctcctgaagtatcaacttcctgagttcaggatcattgggcacatagatgcgatcctcaaaccagaaagttccgtgttcatcctcacgaaaacctttagccttcccgtcattcattctttgcttaatctcagctatttccttgtctgacttctgggcttcatggatttttccggtcaaggtggactgaatttccagcgtggctacaaatcctcttggaactatctccaatttgagctctctgagatcatcgtctaactcctagggtaatcctcccgctatgagtgtgttcacataactcttatggatcaaagcatcggctacaacatttgccttccctggatggtaatgcagtctcatgtcatagtccttgatcaactctagccatctcctctgtcggaggttcaactccttctgcgtgaagatatatttcaggctcttgtgattagtgtaaacatcacaactatttccgatcaggaaatgtctccaggtcttgagagcatgcactacggctgctagacccaactcatgtgtggcataattcaactcatgggttctgagttgtctggatgcataggctacaacttttccttcttgcatgagcactcctccaagtccttgacgagaagcgtcacaataaacctggaaatccttccgaatgtttggcaatatcagcactggggctgtaaccagacatttcttcaactcttggaaactggcttcacattcctcggtccaaacatacttggactccttcttcaacaactctatcatgggcttggcgatctttgagaaattctcactaaacctccagtaatatccggcaagtccgaggaaactgcagatctccttaactgaagtgggtgctacccattcggtgactattgcaaccttggcaggatccacagctattccgtctcctgaaatgacgtgtccgaggaatccgacttccttcaaccaaatttcatatttgctgaacttcgcatatagctgatgctctcgaagcttctccaaaaccaggcgcaagtgttccttgtgttcttcctcattcttggagaatatcagtatgtcatcgatgaacaccacgacaaacttgtccaggtattccataaataccttgttcatcagattcataaaatatgctagagcattagtcagtccaaatgacatgactgtgtactcatacagaccataccgggtggtgaagactgtcttgggtatatcttgttcacaaattttgagctgatgatacccggatcgaagattgatcttggagaacactcgggctccaactaactggtcaaacaagtcattgatcatcggcaagggatacttgttcttgatggtcgcctcgttcaatgcacaataatcgactaccattcttaaggacttatccttcttttcaaccaagagcactggggctccccaaggtgaagaacttgggcaaatataccccttgtccaacaactccttaattttcttcttgatttctactaaatcatttgcgggcatccgatagggtctcctggatattggggctgttccgggtaatagttcaatcaggaactcaatctctctatccagtggcatgcccggcaattcctccgaaaatacatctgggtattcttgtacaatcggtacttcctcctggactactcccgtgagagagtttacccgtttactccgtgacgggcgttgggatacgtacttaatcctcttctgctctggggtggtgagcaaaatagacttaagggcacaatcgatattcccttcgtacttggccaaccaatccatgcctaggattacatccaatccctgagactctaatacgatgaggtcggtgggaaacttatggttcccaatgttgagactcaatgcatggcatcctatctcggctgtcatcatgcctcctggggaactgaccttaataggctggctgagggttctagttggtaaactatacttttccacaactacccttgatatgaatgaatgtgttgcaccagaatcaaaaagtaccaatactagacgtgaatttagcaaaaacttaccaaccatagtatcgggggtgatcatagacctcttcaacatcaatgtgattcacccgagatcggggaaaaggattgggcttctttgctgctgagttgtcgttgccgtttctgtttccttgcttgttctggggacattcagtggcatagtgtcctgtcttctggcatttgaagcaggtgatatgagtcaggtccttctgagctggagcgggagggtgctggttgccattgccattcttgaagttgctgttgttgtggtggttcccatttcctccatggttgtggcctccatggttgtgcactgggtggttatggtgggcgtgtcctccaaacttaccggatccagtcccgatattccctgaataggggttgtagcgaggcttctgctgagtgccggagttgaacttcccattgccatacttccgtttgcgattttcaatctgctgttgtttcccctccaagatgagggccttatctaccagctcctggtagttgttgaagttggccacagtcagcggaatactcaactcatcgttgagtccttccatgaacttctcctgcttggccgcatcatctgccacatctccaggtgcataacgagcgaacatgctgaattcatcaacatactgtgccacagagtgatttccctggcgtaagttgcgaaactcacgcttcttgagactcatggcaccaactgagtcatgagcggtgcggaagtcttgcttgaattgctcccaggtgacaccagcgatggggtaagtggtggtgtagttctcccaccaagcagctgcgggtccttcaagttggtgcgccaaaaagtgtactttcttagcttcagtacatcctgcagtaatcagctctctctccaacttgcggagccaatcatcagccacaatgggctcagtgctgctggagaaagtcggagggttcaacctcagaaagcgggtgagattgtcggcctgaggtggatggtgctgattgttgtttttctggttctgaataagcaactgcatcacggtgttctgctgttggatcagctgagcaagttccggcgggaagttggaagcagggtcacgtctcggaggcatctggtgtttgtagagggatgggattagcatagaacaagggtctaaagagtgaattcactacccatatgaaatgcagcaaacaattatcacaccacacatttattcattcaatcatctcaaaaggttcacacacgaggatacaagcttacgaaatcctaaacatcatactaaacgtttaacgataagataaatgtggtggtcttgtctatgactcctcctcagaagtgcatggtggtggcttcgtcggtggagctttcttcatagtcgtcctggttgctgatcaggggagctgtgtctccttcagggtgaaggttttcgcccatgtccaactcctcctccagataagcaacacgagccttcatcttcttgattctttccagaaagtccttcacttcctgctcgtgctcatagtgggcttctcgggctgcatcttccagatccagttcgtggcgcgtcagtcgcttgatcgtcttcctgtccttgcatacatgaagttccagagtcctgatgtgtgtctccagggtctgggcataagacaagagagcgtcttcagtcttggtcggaatgatttctccatcatctcctctccaggagaccgtgaataagtccagggagatgggacagcctctgtactcctccttgattcttccgagcgcgcagtgtaatgccaagttccttccaagaatccagctgggggcgatgaccttgaagtccatagattccgtgcgaggctcgatggtccttccacggatgtgcacctcaaccctgtagcttgcgtcagccgggtaagactgggtaggcttcccggtgatggttgggagagaaatcctgaggtccctggtgatctgcatcagctccgttccgaagggcatcgtcacatccggctggcagaactccgtgatcataactgggacgaaggtggccatctagagaatattggaaaaatcgaagaggagttagaatagagcaggggggaaatatagaagatttaaagacacaagtaaaattgttttcttcctagggcttttccaaacctagaggttatgtcctacggtcagcgtgtgctctgataccatctctgtagcgacccaacctgaaaacggccaagtctctggtgtttctgtaccatcccaagatcatgctggtacacacacattacatcaatgtatatatcgagagttcaatcacacaactttattaatcggatctcatatcgagtactttattacaataatgattacaataaagaggctgaaggccaaattcatgagataactaacgaagactagcaggagcatcaagcagtagagtccatctgactccagggcatatcaccaagcgtagaccgtgacctcactcctgatcggaatagtactatgcaacaagacacgttgcaaccgtgtaggtgagcatattgaatatgtcggcaagtgaccaaagagaggggtgaaaatagtaatcatctatactatatgcatatatggcaggtggggctacaagtttttagcagaaagcaaagttttctcctacaacaagagagggctaaaagcaaaatattactatagtgttggttgttaacgagatggttccgccaaccaattctcatacccgagttgtcaataatacccacatcattattaaattgtgttgagagttctggaaaatttcaattccttcggctcaagttgtccatgaccgtggacacggctaatcgattaggtttgggtactctgcagagttttgcacacgttccccacaagatttgatcacctccgtgtatgtcctcgcacttcagggtgtttgaagaccggatgatcaaaacatggtctttcaacgggtccctctgatcctctgtcggtgcccatccaatcctgccattcttctacatctcgtagcactgcctatctagagtcgacgcgttgtccaaccaagccagagcccataatgacttgtggctgtgcaggtaagccttgggtcttgaagcctccgtccatctcttcgagcctgggtgaagctttccgcaagatgtcatggtgcttctccatgcatcccgggtcgtccaatggtttcttcagggagcccatctaaaccgtccttcacccagagttgcattgcatcacgaggtcttgaaaagtcttgaattaactggtcttgattattaaaatattcttgcatcactcgtgatagactctcaaccaaaaccccgtctacttaagcatagcaaaatagaattcatcgtcccaagccaaataacagggttgttgggtgcctaccacatgatactacaacaagtaaccataatttccaagtacctacttagcatgcaattggatgaagaaaggtagaactacaatgcatagaaaaacataggtaatagtatgatcaacgtgacttgccttgctgatagttgtcgtgatcaagcgcttctaggtagcaatcttcgcactccgggtgatctatcgatacaaacaaaatacacacaagaagcactacaatcactaacaatcaaaataaaatcactaacatataaacactataacacaaggtgttgaaattcattttacctaaccaaaacagaatctgttttggtaaaaccccaagtaaaaatatttaaaaaaattgaaacttaaactactgaaagatattatcactaggaaacggtagcaaaaagaattaaattaaaagctattttaaactcccagaataagcaaaacaaggtttaaactaaatttgttctaattcaaattttgaaatttcaaacataggcaaataatatgttttcggaaactataagaaaattgtgatctactgcaaaaagaatcaactccattggattcctagattaaaagatataaaggaaacaaaattgaaactggttctgtttttgaaattaaaacagaaaaagaaatactaacctaacgaacagggcctacgtggcagctcctgattggtcaggggtgtgcgctgcggtgacttagctagcgaacggccgcaattaaacaaaatgctcttggctaatattaagtgaagaagaaaactgttcggtttttatctaaaaaccgaaggggtatcggtgatctaatcacgtgcgcacatccacgatccaacggctacgcttcaagggggaagctcaccgtgggggctgccggtgttgctctgctccggcgaggccgagacgaggtggtggtcggggcggcgattccgacaggtcccgaccgtgtccgaggggtcggggaggtggcggcgaggctcctgcatcctctggtggcgacggtgaggcgagaggggcgtcggggcgagcaggggaagctcagagagcttcggctacaagccgaactccggcgaggtggcggggtggcgtgggggcgaggagctttgggtttggggaagggaacggggtgcagaggggtaggggagtttatttagggggaggagagggctcgggagggaaggaggagggagatcgggagaggagatcggccggctccggcgagggaaagagatcggggctggggaaggaaagagagggagaaaggatgaaggcgaccggcgaggagattgggtcggccagtgggcccgggtggtcagagagagagagagagagagagagagagagagagagagagggcgaggccgcagtggttggctgatccgaatgcagatcggatcccggctaaggggggatcggcccatggcactaaatgacgctcgggcgtttttccaaaaatgaaagatttcctattttttcaaaaacaaagaataaaacaaataaaaaggcaataaaataaaatcctaaaataggggtattatataccaaaatttttagaaaaataaactctacacatttaacatttttccaaggccaaaataaaaactttaaaaatatattttttcaaaaaatccctaaaaggtttatttctttttgcaaatatttttctcaatagaattttggtttccttggctcaaaatatttcaaaaatgccccgggttttggagggtcatgttcctcctctcattcttgtttggcaagaatttattcccggcatttcttgagtgggaaaaaatagaaatgcaaacccacaaatcgaaagaattcaattgccagctttattacaatcaatatgcatagatgcttagctcaattgtaaaacattacgaattaggaaatttgggatgttacagagagtgagaacataacgatagccatcgcgagcttcaacgttcattggaccacatacatcggtatgtattatttccaataagtcggttgctcgctccactactcctgagaatggagtcttggtcatcttgcccatgaggcacggttcgcacgtgtcaaatgattcaaaaccaagagactccaaaattccatcagtatggagtttcttcatgcgcttaacacagacatgaccaaggcagcagtgccacaagtatgtgggactatcattatcaaccttacatcttttggtactcacactatgagtatgtgtaacatcacaatcgagattcatcaagaataaaccattcaccagcggagcatgaccatagaacatatcactcatataaatagaacaaccattattctctgagttaaatgagtagccgtctcacattaagcaagaccctaatacaatgttcatgctcaaagctggtactaaataacaattattaaggtttaaaactaatcccgaaggtagatgtagaggtagcgtgccgacggcgatcacatcgaccttggaaccattcccgacgtgcatcgtcacctcgtccttagcgagcctccgtttattccgcagttcctgctttgagttgcaaatgtgagcaactacaccagtataaaatacccaggagctaccacgagcgctggtaaggtacacatcaataacatgtatatcatatatacatttgatgttgccggccttcttgtccgctaagtatttggggcagttccgcttccagtgaccggttcccttgcaatagtagcactcagtctcaggcttgggtccattctttctcttcttcccagcaactggcttaccaggcgcggcaacagctttgccgtctttattgaagttctccttacccttgcctttcttgaaactggtggtcttattgaccatcaacacttgatgctctttcttgatttctacttctgcagatttcagcatcgagtacaacttgggaatggtcttctccatcccttgcatgttgtagttcagcacaaaacccttgtagcttggtggaagagactggaggattctgtcaatgatagcatcatccggaagttcgactccaagctgagtcagacgactgtgcaacccagacattctgagtatatgctcactgacagaactgttctcctccatcttacagctaaagaacttgtcggagacttcatatctctcgacccgtgcatgagcttgaaaaactagtttcagctcctggaacatctcatatgctctgtgttgctcaaaacgcctttggagccccggttctaaattgtataacatgccacacttaactagagagtagtcatcgactcgcgacagccaggcgttctggatgtcctgggctgccggggcagcgggagcatcacctagcggtgcctcaaggacacaagccttcttggatgcaatgaggatgagctttaggttacggacccagtccgcatagttgctgccatcatctttcaacttcattttctctaggaacgcgttgaaattcaggcttacagttgtgttggccattggatctacaatatttgtaaagacaacttttagactaagttcatgataattaagttcatctaatcaaattaagtaatgaactccgacttaaattgacatccctctagtcatctaagtgttacatgatccatgtcgactaacccgtgtccgatcatcacgtgagacagactagtcgatgatggtgaacatctccatgctaattgtatcaaccatatgcctcatgttcgacctttcggtctcttgtattagaggccatgtctgtacatgctaggcttgttgagtcaacctaagtgttttgcgtgtttaaatctggcttacacccgttgtatgcgaacgttagaatctatcacacccgatcttcacgtggtgcttcgagacaacgatccttcgcaatggtgcacacttaggggaatacattctcaaaattttatgagggatcatcttatcatgctaccgtcgttctaagcaataagatgaaaaacatgataaacatcacatgcaatcatatagtgacatgatatggccattatcatctttgctccttcgatctccatcttcgggcatcgcatgatcatcatcgtcaccagcatgacaccatgatctccatcatcatgatctccatcattgtgtctctgtgaagttgtcacgccaactattactactactctacagctaaccgttagcaatgaagtaaaaatagtaaacacatggtgttgcatctcatacaataaattaagacaactcctatggctcctgctggttatcatactcatcgacatggaagtcgtgaatcctattacaagaacctgatcatctcatacatcacgcatgtaacatcacatcctttggccatatcacatcacatgtcataccctgcaaaaacaagttagacgtcctctaattgttgttgcaagttttacgtggctgatttgggtttttagcaagaacgcctccttacctatgtgacagccacaacgttgatatgccaaagctatttacccttcataaggactctttttagcaaatccaatccgactagagtaggagagacagacacccgctaggcaccttatgcaccatgtgcatgtcagacggtggaaccagtctcacgtaagattacgtgtaaagtcggtccgggccgcttcatcccacaatactgccggaaaagaataagactagtagtggtaagcaattgacaaaatcagcgcccacaacctttgtgttctactcgtgcaaagaatctacgcatagaaaacctaggctctgataccactgttgggtaacgtagcaaaattcaaaattttcctacgccatacaaagatctttgatacgtccattttgcatcatgctttcatgttgatatttatcgcactttggactgttattatactttttggtgcaatacttatgccttttctctcctattttgcaaggtttacatgaagagggataataccggcagctgagattctgtactgaaataggagcaagtctgggacacctattctgtgcaactccaaaagccgtgaaaatcaacggagaattattttggaatatataaaaaatactgggcggaagaaatacccgaggagcgccagcaggaggcaatgagcctgcacggcgcggcccccctggccgcgccgtggtggctcgtacgccccctactggctctccgacgcccatcttctgctatgtgaagggttttgttctagaaaaaatcaatacggagctttcaggaagaaacgccgccaccacgaggtggaacttgagcagaaccaatctagagctccggcagggctgtcctgctggggaaatttccctcccagaaggggaaatcgtcaccatcgtcatcaccaacacccctctcgttggaggggactcatctccagcaacatcttcattagcaccgtctcatctccaaaccctagttcatctcttgtatccaatctccgtctcacaactccgattggtacttgtatggttgctagtagtgttaattactccttgtagttgatgctagttggattacttggtggaagattatatgttcagatccttgatgatatttattacctctctgattatgatcatatttatgctttgtgagtagttacttttgttcctgaggacatgggataagtcttgctagaaatagtcatgtgaatttggtattcgttcggtattttgatatgatgtatgttgtctttcctctagtggtgttatgtgaacgtcgactacataacacttcaccattatttgggcctagaggaaggcattgggaagtaataagtagatgatgggttgctagagtgacagaagcttaaaccctagtttatgtgttgctttgcaaggggctgatttggatccactagtttaatgctatggttaggctttgtcttaatacttctttcatagttgcggatgcttgcgcgaggggttaatcataagtgggaggtttgtccaagtaagggcagcacccaagcaccggtccacccacatatcaaactatcaaagtaacgaacgtgaatcatatgaatgtgatgaaaactagctagacagaaattcacatgtgtcctcgggagcgcttgctttatatttgagtttgttcaggcttgtcccttgctgctaaagggattgagccatcttgctgcaccattattacttttgttacttgttaccggttacgaattatcttatcacacaactatctgttaccgacaatttcagtgcttgcagtgaataccttgctgaaaaccacttgtcatatccttctgctcctcgttgggttcgacactcttacttatcgaaaggactacgatagatcccctatacttgtaggtcatcaagactcttttctggcgccgttgccggggagtgaagctcctttggtaagtggaatttggtaaggaaacatttatatagtgtgctgaaatttattgtcacttgttactatggaaactactactttgaggagcttgttcggggtatcttcacctcgaccgaaagcacaaggtattgttcctcaacccgctgcacctactgaaaatatttattatgaaattccttcgggtatgctagagaaactgttggctaatccttttacaggagatggaacatcacatcccgacttgcatctaatctatgaagatgaagtttgtggtttatttaagcttgcaggtttgcccgaggatgaggtaaagaagaaggtatttcccttatctttgagggataaagcattgacatggtataggctatgtgatgatactggatcatggaactacaaccgattgaaattggactttcatcagaagttttaccctatgcatttggtacgtcgtgatcggaattatatctataatttttggccgcgtgatagagaaattatcgctcaagcttgggggaggcttaagtcaatgttatattcatgccccaatcattagctctcgagagaaattattactcagaacttctatgctcggctttctcattacaatcgcaccatgctcgatacttcttgtgccggttcttttataaagagagatattgatttcaaatgggatttattggaaagaattaaacgcaactctgaagattgggagcttgatgaaggtaaggagtcaggtatgaatattaaatttgattgcgttaaatcttttgttgagacagatgcttttcgtgattttagcactaaacatggatttgactctgagatagtagcttctttgtgtgaatcatttgctgctcatattaatctccctgaggagaagtggtttaaataccatcctcctatagaagtcaaagtagtagaacctgatccagttgaagagaaagtcattgcttatcatgatcccattgttcctagtgcttacatttagaaaccacctttccctgtgagaataaaggatcatgccaaagcttcaactgtaatacgtaagggctatactagaacacctacaccccctgagcaaattagagttgaacctagtattgctattattaaagatctcttgactgacaacgtcgatgggcatattattcacttctgtgaagatgctgctagaattgttaaacctcatgatagagacaagcatcgacctgttgttggcacacctgtcgtttctgttaagataggagatcactgttatcatggtttatgtgatgtgggtgctagtgttagtgcaatgcctgaatctttatataaagaaatcaaggatgaaattgcacctgctgagatggaattcattgatgtcaccattcagcttgctaatagggacactatatgtccattgggaattgttagagatgttgaagtcttgtgtggtaaaactaagtatcctactgattttcttgtccttgccaccacacaagatagcttctgcccaattatatttggtagacccttcctcaatactgtcaatgctcaaattgactgcgagaaacaaaccgttattgttggctttgagggtgtgctgcatgaatttaatttctctaagtttggcagacaacctcatgaaaaggaattgtctagtagctatgaaatcattgctcttgcttctattgttgtgcctcctactgaccccttagagcaatacttgcttgagcatgaaaatgatatgcatatggaggaaagggatgagatagatagagttatctttgaacagcagcctctccttaggaacaatttgcctgtcgaattgcttggagatccatctccacctaagggtgatcctgtgtttgagcttaaacagttacctgatactcttaagtatgcttatcttgatgagaaagagatatatcctgttataatcagtgctaagctttcagagcaagaagaagagaaattattgaaaactctgagaaagcaacgtgctgctattggatatactcttgatgatctcaagggcattagtcccactctatgtcagcataagattaaaactgatcctgattccaaaccagttgctgatcatcaacgtaggttaaatcctaagatggaggtggtagtgagaaaagagatactaaagcttctggaggcaggtattatttatcctgttgctcatagtgattgggtaagcccagttcattgcgttcctaagaaaggaggtattaccgttgtccctaatgataaagatgaattgatcccgcaaaggattatcacaggctataggatggtaattgattttaggaagttgaacaaggctactaagaaagatcattaccccttgcccttcattgatcaaatgctagagaggctgtttaaacacacacacttctgcttcctagatggttattctggtttctcccaaatacctgtcgcccaatctgatcaggtgaaaaccactttcacttgccctttcggtacctttgcttatagatgtatgcctttgggcttatgtaatgcacctgccaccttccaaagatgtatgatggctatattctctgacttttgtgaaaagattgttgaggttttcatggatgatttttccatttacggataatctttcgatgattgctcgagcaaccttgatcgagttttgcagagatgtaaagacatgaaccttgtcttgaattgggagaagtgccactttatggttaatgaaggcattgtcttaggacacaaaatttctaaaataggtattgaagtcgataaggctaaggtcgatgctatcgagaaaatgccatgccctacagatatcaaaggtataagaagtttcctcggtcatgctggtttctataggaggtttattaaagacttctctaagatttctaggcctctcactaatctcttgcaaaaggatattccatttgttttttatgatgattgtgaagaagcttttgaaatacttaagaaggccttaataactgcacctattgttcaaccgcctgattggaacctaccttttgaaatcatgtgtgatgctagtgattatgctgttggtgctgtcctaggacaaagagttgacaagaaattaaatgtcatacattacgctagtaaaactctagacagtacccagagaaactacgctaccaccgagaaataatttttagcagtcgtgtttgcttgtgataagttcagatcttatatcgttgattccaaaatcactgttcacaccgaccgtgctgctattaagtatctcatggaaaagaaagatgctaagcctagactcattagatgggttctcttgctacaagagtttgacttgcatatcgtcgataggaagggagtaaagaatcctgtagcagataacctgtctaggctagagaatgtccttgatgacccacaacctatcaatgatagcttccctgatgaacaattgaatgtcatcaatgcctcacacagtacgccttggtatgctgattatgctaacttcattgtggtaaaatatataacacctagtttcacataccaacagaagaagaaattcttctatgaattgagacactacttttgggatgaccctcacctttataaagaaggagtagatggcgttattagacgttgtgtacctgaacatgaacagggacagatcctacaaaagtgtcactccaaaacttacggaggacaccacgcgggagatagaactgccccaaaggtattgcaatccggcttttattggcctactctcttcacggatgcccgtaagttcatcttgtcttgtgatgagtgccaaagataaggtaatatcagtagacgttaggaaatgcctatgaactactcactggtgattgaaccatttgacgtatggggtttcgattatatgggaccttttccaaagtccaacgggtatactcacattctagttgatgtggattacgttactaagtgggtagaagctattcccactagtagtgctgatcaccacacctctattaagatgcttaaagaagtcattttcccgagatttggagtccctagatatttgatgactgatggtggttcacactttattcatggtgttttccgtaagatgcttgctaagtatgacgtcaaccatagagttgcatctccatatcatcctcagtctagtggtcaggtggagttgagtaatagagagatcaaactgatcttgcaaaagactgttaataggtctcgaaagaattggtctagcaaacttgatgatgcactgtgggcttataggactgcttataagaatcccatgggcatgtcaccgtacaaaatggtttacggtaaagcatgtcatttacctcttgagctagagcatatagcttattgggctatcaaagagctcaactttgatttcaaacttgctggtgagaagaggttatttgatattagctcgctggatgaatgaagaactcagccatatgaaaatgccaagatttttaaggaaaaggttaagaggtggcacgatagacggatacaaaagcgtgagtttaatgtaggtgatcatgtcttgctatacaactctcgtttaagattttttgcaggcaagcttctctctaaatgggaaggtccttacattgtcgaagaggtatattgttccggtgccatcaaaatcaataatgcagaaggtaactttcctagggttgtaaatgggcaaagaatcaagcattatatctcaggtactcccatgaatgctgaaagcgatataattaataccataaccccggaagagtacataagagatgtttaccagcctgtttcagactccgaaaacaaagaggtatgagttacggtaagaaaactgactccaaaactttcccagtagcaaattttctcagtttcggaatatttagaaaaatagaaaaattcgaggaagtccggaaagtgcacgaggcggccacgagcttgcacggcacgggcccccctggtcgcgccgtggtggcttgtgggcacctcgtgtgcctcccggactccgttttcacgtgggacttcccttttggtcggcaaaaattcattatatattctcccgaaaggtctgaccctcgtatcacgcaattatcctctgtttttgttttgagccaatttcagcgacaggtttagcgtaaagatgtcatttcaggaatctgttggagagaacgatttctctcgagtctatgaataagtaaatgctgatctaaaaagagttgaagtcacggagggatcactggaagaaaccaagggcaaaacaaaggaggagatcgaactcctgaggttatgtgagataactcgtgttcacaatacttatctcactcgtgaaattgttttgctggagaaacgaatcacagagctccaaggtataaatcaaagactaatggccctcttggaacaaaaaggcaagacaactccaccaccatcacctccgaaggaagacaattaaatacatgggtatgggcactcccttggcttgtgccaagcttggggaagttgccccggtatcgtatcaccatcaaatcttttgcttttacttttgtttcagttttatcttcttttcagttttatctttttctagtagaataaagtctttagtatgatcttggttttagttttacttttggttaccccctatgtattcgtgcccgtgagttatatattaagaggtgttttagttaagggcttttcttcatgccatgatcttgagaaagaatagtaaaagaacaaaagcatgaaagatcatatgatgattttatgggaagtgttagcttcacatacaagaagaatgttgattgtaacttgttgtgggtagacaaatgtagatcttggtcattgttgcaaataatatgaagtaataaagaaagtgaggttcacatataaatatatcatctttgacaccatccatgattgtgaacactcattgaactattacatgctaagaagtagatgttggacaaggaagacaacataatgaattatgcctgcttggttctgaacaatgctatatgactagagatcccttaacttgtgatgcttgcttccacttcatattagccaaaactcccgcactaagtagagatactacttgtgcatccatgaaccttcaacccagttttgccatgagagtccaccatacctacctatggattgaataagatctttcaagtaagttgtcattggtgcaagcaataaaaaaattgctctctaaatatgtatgctctattagtgtttggaaaataagctttgtatgaaccagtgatgaagaagacataaaagcgacggactgcataataaagttctttatcacaggggcaatacaaagtgacgttccttcacactaagagatcacgcatccaaactttaaaagcgcatgacaacctctgcttccctctgcgaagggcctttcttgtacctttacttttgatctttaaaagagtcatggtgatcaacaccaattcctttttgccgttatcttggcaagcgtcatgtgttagggaaagatctatattcatatttcagcttggagacaggtagtcatgagttattattgttgacattacccttgaggtaaatagttgggaggcaaactataagcccctatctttctttgtgtccaactgaaactttggtcccatgagtataatgtgagttttagcaattgtggaagactaaaagatgattgagtatgtgggtttgctttataagctctcatttgactctttcccatgttatgataaattgcaattgcttcgatgactgaagactattggttgttgattctcaataaggatcttgatccattctttacattgtgaaggaatgatgcctgcatgcccgtattatatttttttttgacacctctagctctaaatatgtgggcatatttactgatctcagctttcgcttgaggacaagcgaggtctaagcttgggggagttcatacgtccattttgcatcatgctttcatgttgatatttatcgcactttggactgttattatactttttggtgcaatacttatgccttttctctcttattttgcaaggtttacatgaagagggagaataccgacagctgagattctggactaaaatacgagcaagtctgggacacctattctgtgcaactccaaaagctgtgaaaatcaacgaagaattattttggaatatataaaaaatactgggtggaagaaatacccgaggagcgccagcaggaggccacgagcctgcacagcgcgggcgcccctggccgcgccgtggtggctcgtgggccccctgctggatctccgacgcccatcttccgctatatgaagggttccgttccagaaaaaaatcaatacggagctttcgggaagaaacaccgccgccacaaggcggaacttgagcagaaccaatctagagctccggcagggctgtcctgccggggaaatttccctcccggaaggggaaatcatcgccatcgtcatcaccaacacccctctcgttggaggggcctcatctccagcaacatcttcatcagcaccgtctcatctccaaaccctagttcatctcttgtatccaatcgccgtgtcacaactccgattggtacttgtatggttgctagtagtgttcattactccttgtagttgatgctagttggattacttggtggaagattatattttcagatccttgatgatatttattacctctctgattatgatcatatttatgctttgtgagtagttacttttgttcctgaggacatgggataagtcttgctagaaatagtcatgtgaatttggtattcgttcggtattttgatatgatgtatgttgtctttcctctagtggtgttatgtaaacgtcgactgcataacacttcaccattatttgggcctagaggaaggcattgggaagtaataagtagatgatgggttgctagagtgacagaagcttaaaccctagtttatgcgttgctttgcaagcgactgatttggatccactagtttaatgctatggttaggctttgtcttaatacttctttcgtagttgcggatgcttgcgtgaggagttaatcataagtgggaggtttgtccaagtaagggcagcacccaagcaccggtccacccacatatcaaactatcaaagtaacgaacgcgaatcatatgaacgtgatgaaaactagctaaacagaaattcccatgtgtcctcgggagcgcttgctttatatttgagtttgttcaggcttgtcccttgctgcaaaagggattgggccatcttgctgcaccattattacttttgttacttgttaccggttacgaattatcttatcacacaactatctgttaccgacaatttcagtgcttgcagtgaataccttgctgaaaaccacttgtcatatccttctgctcctcgttgggttcgacactcttacttatcaaaaggactacgatagatcccctatacttgtgggtcatcaagcttcctatggagaaaccagcaacgagagaggggtgatacgtctcaaacgtatctataatttttgatggtttcatgctgttatcttatcaaactttggatgttttatatgccttttatatctttttgggactaacttattaatttagtgccaagtgccagttcctgttttttccatgtttttgacccttttcagatctgattttgaaatggagtccaaacagaataaaatccccgaaatgattttttccgaaatagaagaagatcgggaggcttgggagccaaggcaaaggagctccaggggccccacgagccccctagccgcggccagggggagcccgcggctgcctgtctcatgggccccctggccctcctctgccctagctctttggcctatatattccctaaaatcgcagaaaaaatcaaggcatccacgaaaacacttttccgcctccgcaagcttccgtttccgcgagatctcatctggagacccttcccggtgccctgccggaggggactttggagacggaggtcttctacatcaacaccattgcctctccgatgacgcgtgagtagtctacttcagacctacgggtccatagttagtagctagatggcttcttctctctcttggatcttcaatacaaagttctccatgatcttcatggagatctatccaatgtaatcctctttggtggtgtgtttgttgagatccgatgaattgtggatttatgatcagattatctatgagtattatttgagtctttgctgatttcctatatgcatgatttgatatccttgtaattctctttgagttgtgggttttgtttggccaactagatctatgattcttgcaatgggagaagtgcttggttttgggttcataccgtgcggtgacctcacccagtgacagaaggggtagtgaggcacgtatcgtgttgttgccatcaagggtaaaaagatggggttttcatcattggtttgagattatccctctacatcatgtcatcttgcttaaggcgttactctgttcgtatgaactcaatacactagatgcatgctggatagcggtcgttgtgtggagtaatagtagtagatgcagaaagtatcgatctacttgtcttggacgtgatgcctatatgtatgatcattgcctttgatatcgtcatgactttgcatgattctatcaattgctcgacagtaatttgttcacccaccgtctacttgctatcttgagagaagcctctagtgaaccctatggcccccgggtctactcaccattataatttcagctttacacttttactttgctttgctttttgctttcagttctcactttccaaacaatgtataagggattgacaacccctttatagcgttgggtgcaagcgctttgtgtttgtgcaggtacttgtgacttggcgcgatcctcctactggattgaaaccttggttctcaaactgagggaaatacttaccgccgctatgctacatcaccctttcctcttcaagggaacaccaacgcaaggctccaaggccgcgggggtatccttagcatatttgccaaggaagtccctataggcgtagccagcagcaaggggttagagcatctttgtacctttaaatatcgctaagcggaagcgttgctagaacgcggttgatggagtcgtactcgcagcgattcagatcgcggtgtgattctgatctagtgccgaacaacggcacctccgcgttcaacacacgtgcagcccggtgacgtctcccgcaccttgaaccagcaaggaagagggagaggttgagggagagctccggcagcacgacggcgtggtggcggtggagctacgatgtattccgacagggcttcgccaagcaccacggaagaggagggagaggagaagcagggctgcgccgagagagagtttgctggtgtctcaaatcagccaaaacctccactatatatagggggagagggagggggcgcaccctttagggttcccacccccaaagggtgcggcagccatagatgggagggcctggcggcggccagggcagggagagggtggcgcacaccttaggtgggccttaggcccacctgcgcctagggttcccccttcctctcttgtggcgccttgggccaagtggggaggcacaccaacccacctaggggctggttccctcccacacttggcctatgtagcctcccggggctggtgacccctcccggtgggcccccggaacccttccggtggtcacggcactttgccggtggtgcccgaaacatttccgacgtccaaacccatccatcctatatatcaatctttacctccggaccatttaggaacacctcgtgatgtccgggatctcatccgggactccgaacaaccttcagtaacctcgtacatcaattccctataaccctagcgtcattgaaccttaagtgtgtagaccctatgggttcgggaagaatgcagacatgaccgagacacctctccggccaataaccatcagcggggtctggatacacatggtggctcccacatgttccacgatgatatcatcagatgaaccacgatgtcaaggattcaatcaatcccgtatacaattccctttgtctaccggtatagaacttgcccgagattcgatcgtcggtatccctataccttgttcaatctcgttaccgggaagtctcttgactcgttccgtagcacatcatcccgtgactaactccttagtcacattgagctcattatgatgatgttctactgagtgggcccagatatacctctccatcacacagagcgataaatcccgatcttgattcataccaacccaacagacactttcggagatgcccgtagtgcacctttatagtcacccagttacgttgtgacgtttgatacacccaaagctttcctacggtatccgggagttgtgcaatctcacggtctaaggaaaagacacttgacattagaaaagctctagcagacgaacaacacgatctagtgctaagcttacgattgggtcttgtccaccacatcattctcccaatgatgcgatcccgttatcaatgacatccaatttccatgatcaggaaaccatgatcatctattgatcaacgagttagccaactagaggcttgctagggacacattgtgatctattcattcacacatttattagtgtttcctgttaatacaattatagcatgaacaatagacgattatcatgaacaaggaaatatgataataactgttttcttattgcctctagggcatacttccaacagtctcccacttgcactagaatcaataatctagttacattgtgatgaattgaacacccatagcattatggtgttgatcatgttttggtcgttgaagaggtttagtcaacgggtctacaatattcagatccgtgtgtactttaaaaatatctatgactcctttctggacctggtcgtggatggagttggagcggcgttggatgtgcttggtcttcctgtgaaacctgggctccttggctatggcaatggctccagtgttatcacagaagagtgtcatcgggcctgacgcacttggaaccattccaaggtcggtgatgaattccttcatccagatcccttcatgagctgcttccgaagcagctattttctccgcttcacatgtagatgctgccacgacgtcttgcttgttgctgcaccagctaactaccccaccattcaaaacatagacgtatccggtttgtgacttagagtcatccagatttgtgtcgaagctagcattggcgtaaccctttacaacgagctcttcgtcacctccataaacgagaaacatctccttagtccttttcaggtacttaaggatattcttgaccgctatctagtgatcattaccgggatcactttggtacctccctaccaaacttatggcaaggtttatatcaggtctggtacacatcatggcatacattagagagcctacggctgaagcgtaggggacaatactcatcttttctctatgtgctgccgtggtcggtgattgagtcttactcaatctcataccttgcaaaactagcaagaaccccttcttcgagttttccatattgaacttattcaatatcttgtcaaggtatgtactttgtgaaagacctatgaagcatctcgatctatctctatagatcttgaggcctaatatgtatgcagcttctccaaggtccttcattgaaaaacttttattcaagtaggcctttatgctctccagtaactctatatcatttaccatcaataatatgtcatccacatatactatgagaaaagctacagatctcccactcattttcttgtacagacaggcttctccataaacctgtatgaacccaaacacttgaattacctcattaaagcgaatgttccaactccgagatgcttgcaccagcccatagatggagcgttggagcttgcataccttgttagtactcttaggatcgacaaaaccttctggttgcatcatatacaactcttccttaagataaccattaaggaacgctattttgacttccatttgccaaatttcataatcatgaaaagcggcagttgctaacatgatttggactgactttagcttcgctacgggagagaaagtctcatcatagtcaattccttgaatttgttgaaaaccctttgcgacaagcagagctttataaacggtcacattaccgttcgcgtcagtattcttcttaaagatccatttattttctatggctcgccgatcgtcgggcaagtccaccaaagtccatactttgttcttatacatggatcctatctcggatttcatggcctcaagccatttgttggaatccgggcccgccattgcttcttcatagttcgaaggttcactgttgtccaacaacatgaactccatcacaaggttgccataccactctggtgcggaacgtacccttgtggaccttcgaggttcaatagcaacttgatccgaagtttcatgatcaccatcattaacttcgtcctcatttggtgtaggcaccacaggaacattttcccgcgctgcgctactctctggttcaagaggaggtacaactacatcattaagttctactttcctcccacttacttcttttgagagaaactctttctctagcaaggatccgttcttggcaacaaagactttgccttcagatctaagatagaaggtatacccaatagtttccttggggtatcctatgaatacgcatttctccgctttgggttcgagtttttttggttgaagtttcttcacataagcacaagctttgggttcgagcttcgggttcgagctttgggttcgagcttttctgtttcctgtctgtgggaatatgaaggatttctccacctataaaaccattcacttccacctgcttcacaagggttttatgccacactataacgtttggaccaagcacgaagaaagaggggttatgatggaggacaacgtagaagaacatgatgatgacaactacctgccccctgaatattgtgatgctgcaatgggggaagctgaagatcaagaggaaccagacgatgtgcccgatgatgatcttcgtcgggtcattgttgatgcacacagagaatgcgaaagtgaaagggagaagttgaagttcgatcgcatgttagaggatcacaaaaagggttgtacccaaattgcgaagatgacaacacaaagctcggtaccacactggaattgctgcaatggaaggcagacaatggtgtatctgacaaaggatttagttcattactaaaaataatgaggaagaagcttccaaaagataacgaattgcccggcagtacgtacgaagcaaagaaggttgtatgccctccaggattggaggtgcaaaagatacatgcatgccctaatgactgcattcctctatcacggtgtgtacgaggatttgaacgcatgtccggtatgcggcgcattgtggtataagatcggaagagatgaccctggtgatgttgagggccagcgcaccgggaagatggttcctgccaacgtgatgttgtatgctcctataataccacgattgaaacgtctgttcagaaacaaaaagcatgccgagttgatgcaatggcacataaaagaccgtaagaaagacgggaagttgagagcacccgctgacgggtcgcagtggagaaagatcgagagaaagtggagcgactttacacgtgacccaaggaacgtatggtttgggtcaagtgcagatggcgttaatcctattagggagtgatacgtctctaacgtatctataattttttatcgttccatgctattatattatcaactttggatgttttatatgcatcaatacgctattttctattatttttgggactaacctattgacctagagccaagtgccagttcctgtcttttccttgttttcgacctttttcagataggaatatcaaatggagtccaaacggaataaaactttcgccatgattttttatggaaaatatcaaaaataccagaagaaaaatataccagaggggagtcccgaggaagccacgagccagggaggcgcgcacacccccccgggcgcgcctagggggctcgtgactccctcgtgggtccctgtgacttgttctcggcgccatccactcctataaatacagaaacctccagaaataaaccaagatcaggcgttcccccgctgcaagcctctgtagccaccaaaaaccaatcgggagcccgttctggtgccctgccggagggggaacccatctccggtggccatcttcatcatcccggcgatctccacgacgaggagggagtagtccaccctcggggctgagggtatgtaccagtagctatgtgtttgatctctctctctctcgtcttcttgagatgtcttgatctcgatgtaccgcgggctttgctactatagttggatcttatgatgttcttcccccctctcccttcttgtaatgaattgagttttccctttgaagttatcttatcggattgagtctttaagaacacttgatgtatgtctcgcacgtgtctatctgtggtgacaatgggatattcatgtgagtacttgatgtatgttttggtgatcaacttgcgggtttcgtgacctcgggaacctatgcatatgggttggcacacgttttgactctccggtagaaacttcggggcactctttgaagttctatgtgttggttgaatagatgattctgagattgtgtgatgcatatcatataatcatgcccacggatacttgagctgacaatggagtacctaggtgacattagggtcttggttgatatgtgtcttaaggtgttattctagtacgaactctaggatagattgaacggaaagaatagcttcgtgttattttactatggactcttgaatagatcgatcagaaagaataactttgtggtggtttcgtacccgacaataatctctttgtttgttctccgctattagtgactttggagtgactctttgttgcatgttgagggctagttatatgatccaattatgttatcattgttgagagaacttcactagtgaaagtatgaaccataggccttgtttccacgcattgcaatactgttcgtgctcacttttactattagttaccttgctgtttttataatttcatattacaaaaacctatatctactatccatattgcacttgtatcaccatctcttcgccgaactagtgcacctatacaatttaccattgtattgggtgtgttggggacatgagagactctttgttatttggttgcagggttgcttgagagagaccatcttcatcctacgcctcccacggattgataaaccttaggtcacccacttgagggaaaattgctactgtcctacaaacctctgcacttggaggcccaacaacgtctacaaggagaaggttgcgtagtagacatcaagctcttttctggcgccgttgccggggaggttagcgcttgaaggtatatctttagatcttgcaatcgaatcttttagtttcttgttttatcactagtttagtttattaaaagaaaactacaaactaaaaaaatggaattaaggttgcctcatatgcttcatctttttaatgtctttcgtgaaaatgatggaaatgaaaattgtgctcaagtgctaaaagaagaattacatagaatgcttggcataaaatatgtgaatgatgagaatgattgcaatgctgttagtatgaattctttgaatacccatgatgctaatgatatgcaaagccacaagcttggggatgctatgtttgatgaagatgatctttttagttcccccactttgaatgatcaaaattattatgatgaaagcatgccccctatctatgatgattattgtgatgatacttatgctataaagaagaatgataataaaacatgtcacaattatgagtaccctcttactgaacattactcttttaatgtggaaacaattcgtagtgttcaagtcttttacgatactcccactactattgatgagaataaatttccttatgtggagagtagtaaaatttctatgcttgtagatcatgaaaagaatgctttaggttctggttatattgttgaattcattcatgatgctactgaaaattattatgagagaggatcatatgcttctacatattgtaataatatcaagcttcctctccatatgttgaaacttttgaagtcatgcttgttttatcttcctatgctagttgattctagctacaataaattgtttgatcacaaaatccctatgcatagtaagtgggttagacttaaatgtgctagtcatatgctccatgatacttccattatgtttcaatccttatcttttatgtgagcatcattgaaatcatcatgcctagcttgaaaggcattaaagaaaagtgcttgttgggagacaacccaatatgtatccttactctttttgtgtgttcacatgattaagatactgtattaatcatgttttattgccttagtttcaataaagtgccaagtaaagcctttatgattagtttgggtgataattgtttgatcatgctgaaaaagacaaaaactttgcgctcgcgaaatcatttctaatttttatccagagagtgcttttaggttgattatttttgcttctgattgatatacaaatttccttagttgtcataattgtttaagaatttttggaagtgcagaagtatggttatcattcagatcattacagactgttctgtatttgacagattctgttttcaatgcatagtttgcttgttttggtgtttccatagattatattgagtaatataaattgtggaaatagtaatatacagtagtaattgtatgaaaataattatgagtcttgtttttacagtaccaaagtgattgatttgctcgttatcatactaacccatctcacgaagttccattaagttttgtgttgtgaagttttcaagttttgggtagagtttcgatggactatggaacaaggagtggaaagagactaatattggggatgcccaaggcaccccaaagccatattcaaggacaccaaagatcctaagcttggggatgccccgggaaggcatcccctctttcgtcttcaatccatcggtaattttacttggggctatatttttattcaccacatgatatgtgttttgcttggagcgtcattttattttattaatacttgcttgctgttatttagatgaatgttttgcatcatttagttcaataaaaatgtaaaggatagcctttaccatggttaatttgcaagtataggagttgctgttccaaaacagaaagtttgcttgtagtgcaaaaattccctagaattttctgtacatcggaatagcatgaaatttggacacagtatgctattataaattatctacataattgaattatttcagaatttttggagttaattaagtatggatattgctgcattcttcacagactgttctgtttaggcagattgctgttatgtttgcattgttcgcatatgtttccttgtttaatgattccatttgaggatgggagtttgaaatatgcagaggaatttagtatgcaatgtcaaataataatattagtgatttgatacagtagaggatgataaagttttgcattgatttatactaacctatctcacgagttcttgttgagttttgtgtggatgaagtttttaagattttggaaaccatcatatgagaggaattaaggagacacaaaagctcaagcttggggatgcccaaggcacccccaatacatatttcaataagtctcaagcacctaagcttggggatgccccggttggcatcccacctttcttcttcaacaattatcggttagtatcggttgaacctaaatttttgcttcttcacacaattcgtgctatccttggagtgtcaatttattttgtttgaataaggtacttaagatctgaaattcttaaatgggagagtctccacatagacaaataattattcaactactcattgagcttcacttatatcttttggagtagtttgccttttgctccagtacttcacttatatctttgaagagcattgcgatgattttattttatagaaatagttgaactctcctgcttcacttatattattttgagagtcttaaacagcatggtaatttccttaggttatgaactagtcctaatatgatgggcatccaagaggcatataataaaaactttcatatagagtgcatcgaatactatgagaagtttgattctttgcacgtagttttgagatataaggatggtgatattagagtcgtgctagtgagtaatcatggattgatagaaatacttgtgttagagtttgtgattcctgtagcatgcatgtatggtgaaccgttatgtgataaaatcggaacatgatttatttattgagtgtcatcctttgtgtggaggtcgggatcgcgtgatggttaactcctaccaacccttcccctaggagcatgcttctaatagtttgctttgatagctaataaacttttgcaataagtatgtgagttctctatgactaatgttgagtccatggattatacgcactctcacccttccaccattgctagcctctctagtaccgcgcaactttcgccggtgcatgcacccaccatatatccttcctcaaaacagccaccatacctactcatcatggcatttccatagccattccgagatatattgccatgcaacttccaccgttccgtttattatgacacgcatcatcattgtcatattgttttgcatgatcatgtatttgacatcgtatttgtggcaaagccaccgttacctttcatacatgtcagtcatgagtcattgcacatcccggtacactgccggatgcattcatatagagtcatatctttgttctaagtatcgagttgtaagtaaataaaagtgtgatgatcatcattattagagcattgtcccatgtgaggaaagggcggaagctatgattccctcacaagttgggatgagactccggacttaaaataaaaaggaaataaaagaggccaaagagcccaccaaaaaaagaataaaaaaatgaaaaaatgaggccaaagagccctgctgctggctatgcctatagggacttccttggcaaatatgctaaggatacccccgcggccttggagccttgcgttgtcgttcccttgaagaggaaagggtgatgtagcacatcggcggtaagtacttccctcagtttgagaaccaaggtatcaatccagtaggaggatcgcgccaagtcagaagtacatgcacaaacacaaagagcttgcacccaacgctatgaacgggttgtcaatcccttatagattgtttgcgaagtgagaactgaaagcaaaaagcaaagcaaagtaaaagtgtaaagctggaattataattgtgagtagacccgggggccatagtgttcactaaaggcttatctcaagatagcaagtagacggtgggtgaacgaattactgtcgagcaattcatagaaccgcgcaaagtcatgacgatatctaaggcaatgatcatacatataggcatcacgtccgagacaagtagaccgatactttctgcatctactactattactccacacatcgaccgctatccagcatgcatctggtgtattgagttcatacgaacagagtaacgccttaagcaagatgaaaaccccatctttttacccttgatggcaacaacacgatacgtgcctcactaccccttctgtcactgggtgaggtcaccgcacggtatgaacccaaaaacaagcacttctcccatgcaagaatcatagatctagttggccaaacaaaacccacaactcgaagagaattacaaggatatcaaatcatgcatataagagatcagcaagtactcaaataatgctcatagataatctgatcataaatccacaattcatcggatctcgacaaacacactgccgaagaggattacatcggatagatctccatgaagatcatggagaactttgtattgaagatccaagagagagaagaagccatctagctactaactacggacccgtaggtctgaagtagactactcacgagtcattggagaggcaatggtgttgatgtagaagccctccagctccaaagtcccctccggcagggcaccgggaagggtctccagatgagatctcgcggaaacggaagcttgcggcggtggaaaagtgttttcgtggatgccctgattttttctatgattttagggaatatataggccaaggagctagggcaggggagcgccagggggcccacgagacaagcagccgcgggctcccccctggtcgcggctagggggctcgtggggcccctggggctcttctgccttggctcccaagcctcccgatcttcttctgtttcgaaaaaatcatttcggggattttattccgtttggactccgtttcaaaatcagatctgcaaagggtcaaaaacacggaaaaaacaggaactggcacttggcactgaattaataagttagtcccaaaaaagatataaaactcatataaaacatccaaagtttgacaagataacagcatgaaaccatcaaaaattatagatacgtttgagacgtatcaagcatccccaagcttaactcctgctcgtcctcaagtagggaaatgataaagaatgaattttcgatgttgcatgctacctggcatagttgtcctttgtaactcctcttatgtgacacgaatgttcagatccgtgagattcaaaacaatagttttctattcacgtggaaacaataatacttcaagcaaactagcaaggtaatcataaagtttctaaataacaaggccaaaagaaagttatccctacaaaatcatatagtctggctatgctctatcatccttgcacaacgaatttaagtcatgcacaacctcggtattggccaagtaattgttttcacacctttactttctcaaaccttttcaactctcgcgcaatacatgagcgtgagccatggttatatcactataggtggaatggagtgtggtggaggttgtaagacaaaaaggagaagatggtcacattgactaggcatatcaatgagctatggggatgctcatcaatagatatcaatgtgaatgagtagggattgccatacaagagatgcactagagctatgagtatgtgaaagctcttaaggagaactagtgggtgtgcatccaacttgcttgctcacgaagacctaaggcaattttgaggaagcccatcattggaatatacaagccaagttatataatgaaaattcccactagttatatggtggtgacaaagcgagaggctctcaatcatgaagatcatggtgcttaatatgaagcacaagtgtggaaaggagatagtagcattgtcacttctctctttttctctcatttttttggtgggctctttggcctctttttttcttttttctttttttattttggtgggcatcttttggccgcttttttgtaaatgggcttcgctagcctcttttatttcctcacatgggagaatgctctatcaatgatgatcatcacacttacaactcaaaacatagagcaatgatgactctatatcaaatgccttcggtactgtaccgtgacaatgatcaagcatggcattgacatcaatggaaacatcatgctagctatcttacgatcatgcaatggcaatgtagaagtggtggcacatgtcatgagatggaacggtggtagttgcatggcaatatatctcggaatggctatgaaaatgccatagtaggtaggtatggtggctgttttgagggaggctatatggtgggtttatgtaccagcgaaagttgcgcggcactaaagaaggtagcaatggcggaaggtgaaagtgcatctaaaccatggactcaacattagtcatgaagaactcatatacttgttgcaaaagttttattagtaatcgaaacaaagcattcaacgcatactcctaggggaagggttggtaggtataaaccatcgcgcgatcccgaccgctacacaaaggatgacaatcaataaactaatcatgctcaaacttcatcacatagcggttcaccatacgtgcatgctacgggaatcactaacttcaacacaagtatctctagattcacaacaccctactaacataactttaatattaccacaaccacatctcaaaactaattgagaggaatcaaacttctcttgaggaatcaaacttctctttctactcaatgcacatgaagatggaagttttcgtatcctctttggataactaccacttttgggactactttcatagcataaaccaactaccaagccagacaccgccgtgctctaaaaagatctaagtgaagcacatagagcaaaatcaactagctctaaagataaaagtgaaacacatgtgagctgaattgcctaaccaaaggatataagtgaagctcgaaaaaatcacggtgagtgcatgtatctctatctaggtgtgcagcaaggaatattgtgacacaacaaaaataaaagactcctacgatacaagacgctccaagcaaaacacatatcatgtggtgaataaaaatatagctccaagtagcgttaccgatggattgaagacgaaagaggggatgccttcccggggcatccccaagcttaggcttttcggtatccttgaatcaatttggggtgccttgggcatccccaatcttgagctcttgccactctttatctctttgtccataagaacatcacccaaaacttgaaaacttcacaacacaaaacttaaatagaaactcatgatatcattagtataagaaagaaaatcaccacttccttaggtactgtagtggacttaaattctacttatgttggtgttgggttactgtattttcacttctccatggctagtaccccccgatactatccatagttccatcaaaataagcaaccaactcaacaaaaacagaatctgtcaaaaacagaccagtctgtagcaatctgtatacttcatatacttctggtacttcaaaaattctgaaacattatgaccgtatgaagaatttgcgtagaaatcagcagcaagaacaatcaactcaaaagctctcacataaaaaaacgaaaattcttttcgtgagcagaaagtttctgtcttttccaccatgatcaaacgatcatccccaagactaatcataacggtttcacttggcacaaacgcaaaaagaaacacaaaaaacacaatcataaaagaattatgaaagtgtggaaaacacaaaacataaacaaaaaggataaattcgttgggttgcctcccaacaagcgctattgtttaacgcccttagctaggcataaggtgatggaatcacgtatagtcatctttggttctcaaaccataagtagccatcatcatagattcataaggcaatcttattttattctaggaaaatgctccatgcccttctttagagggaattgaaatctaatattcccttccttcatatcgatgatagcaccgatagtccttaggaaaggtctaccaagaatgatggggcatgaaggattgcaatctatgtcaagtacaatgaaatccacgagtacatagttcttatttgcaacaataagaacatcattgatccttcccatgggtttcttgacagtagaatccgcaagatgcaaattaagagaacactcttcaatctcatgaaaaccaagaacatcacataaagactttggaatcgcgaaaacactagcaaccaaatcacacaaagcattgcattcatagtttttgattttgattttgatagtaggttcccactcatcatgaagctttctaggtatagagacttctaattcgagtttatcttcaagagatttcatcatagcatctacgatatgagcggtaaaggctttgctttggctataagcgtctggagagtttgcaatggattgcatcaaggaaatgcattcaaacaaggagcaactatcataattgaatcccttgaaatccaaagtggtagtttcattactaccccaggttttgatttcttctactccactctccacacctttagcatcaagataggtggactccgaatcattggggcgtttttcaaccaatgtggattcatatctagcccatcatcaataggtttgacacgagaaaacaaagatttaatgggagacacaccaagcactttaacatcttcgtgattctcatcacgagaacgcacccctttaaaccattcatgcctagcacgtatttgggcggttctttctttgctctcattcatggagacacgcatagcttttaaagtttcatccaagttgatcttgggaggagcacatctaactttcaaagcatcaatatcactagacatcctatcaacgctcttagccaaatcgacaattttgagtagtttttcctctatggacgcattgaaaatcttttgagagttgatgaattctttgatattactctctaaatcagagggtaatttgttatgatttccataagtattgttgtaggagttgccataatttttagaggagttactaggaaaaggcctaggaacatagtttcctctaaaagcattgtcgttgccaaaattgttcctaccaacaaaattaacgtccaagctagcgttgctactctcaatcaaggaagatagtggcatgtcattaggatctaaaggagcacttctactagcaaacaaattcattaacccgtccatcttagcactaagcgagttaatttcttctatagcgtgtacctttttactagtaggtgacctttcagtgtgccactgagagtagtttgtcatgatattgtctaggagttttgtagcttctcctaacatgatttccatgaacattccacctgaggcggagtccaagatattcctagaagtgaaattcaaaccagcgtaaaagatttgtataatcatccacaaactcaagccaagagcgggacaatttctaatcattaatttcatcctctcccaagattgtgcaacgtgttcatgatcaagttgcttgaaattcatgatatcgttacggagagagataatcttagctggcggaaaatacttggatatgtaagcatctttgcacttattccaagaatcgatactatttttaggcaaagaagaaaaccaagtttttgcacgatctcgcaatgagaacggaaaaagcttcaatttaacaacatcattatccacatctttcttcttttgcatatcgcaaagctcaatgaaggtattaagatgggttgcggcatcttcactaggaaggccagagaatttctctttcataacaagattcagcaaggcagcgttgatttcgtatgattccgcactagtggcgggagcaatcgaagtactaataaaatcattattattagtattcgagaagtcgcaaagtttggtgttttcagccatgatgactgcaacaagcaaacaagaacacaagcaaacgaaaaaacgggcggaaaaagggcgaaagaaaaaggcaaaagaaaacggcaaatgtgaagtgggggagaggaaaacgagaggcaactggcaaaaaaggtaaatgcaagagatgagtttgcgacacttacttggataagatcttgacttgatcctcccaggcaacggcgccagaaatccttctgctgctggctacgcctatagggacttccttggcaaatatgctaaggatacccccgcggccttggagccttgcgttggtgttcccttgaagaggaaagggtgatctagcacagcggcggtaagtatttccctcagtttgagaaccaaggtatcaatccagtaggaggatcacgccaagtcacaagtacctgcacaaacacaaagcgcttgcacccaacgctatgaaggggttgtcaatcccttatagattgtttgcgaagtgagaactgaaagcaaaaggcaaagcaaagtaaaagtgtaaagctggaattataattgtgagtagacccaggggccatagtgttcactagaggcttctctcaagatagcaagtagacggtgggtgaacgaattactgtcgagcaattgatagaaccgcgcaaagtcacgacaatatctaaggcaatgatcatacatataggcatcacgtccgagacaagtagaccgatactttctgcatctactactattactccacacatcgaccgctatccagcatgcatctagtgtattgagttcatacgaacagagtaacgccttaagcaagatgacatgatgtagagggataatctcaaaccaatgatgaaaaccccatatttttacccttgatggcaacaacacgatacgttcctcgctaccccttctgtcactgggtgaggtcaccacacggtatgaacccaaaaccaagcacttctcccattgcaagaatcatagatctagttggccaaacaaaatccacaactcgaagagaattacaaggatatcaaatcatgcatataagagatcagcaaggactcatataatactcatagataatctgatcataaatccacaattcatcggatctcgacaaacacactgccaaagaggattacattggatagatctccacgaagatcatggagaactttgtattgaagatccaagagagagaagaagccatctagctactaactacggacccgtaggtctgaagtagactactcacgagtcattggagaggcaatggtgttgatgtagatgccctccagctccaaagtcccctcaggcagggcaccgggaagggtctccagattagatctcgcggaaacggaagcttgcagcgacggaaaagtgttttcgcggacgccctgattttttctgcgattttagggaatatataggccaaggagctagggcaggggagcgccagggggaccacgagacaggcagccgtgggctcccccctggccacggctagggggctcatggggcccctggggctcttctgccttggctcccaagcctcccgatcttcttctgttttggaaaaaatcatttcagggattttattccgtttgtactccatttcaaaatcagacctgaaaagggtcaaaaacacagaaaaaacaggaactggcacttggcactaaattaataagttagtcccaaaaaagatataaaaggcatataaaacatccaaagtttgacaagataacaacatgaaaccatcaaaaattatagatacgtttgagacgtatcaagcccaaacaaaaaaagagagaagggacaatgctactatcctttaccacacttgtgcttcaaagtagcaccatgatcttcatgatagagagcctcatatattgtcactttcatatactagtgggaattttcgttatagaacttggcttgtatattccaatgatgggcatcctcaattgccctaggtcttcgtgggcaagcgagttggatgcacacccacttagtttctttttgagctttcgtaaacttatagctcttgtgcatctcttgcatggcaatccctactcactcacattgatatctattgatgggcatctccatagcccgttgatacgcctagttgatgtgaccatctccttctttttgcctcataaccaccaccatattctattccacctatagtgctatgtccatggctcacgctcatgtattgcgtgagagttgaaaaggtttgagaaagtaaaagtgtgaaaacaattgcttgactaataccggggttgtgcatgatttaaatacgttgtgtggggaagatggagcatagcgaaactatatgatattgtagggataactctctttggccatgttattttgagaagacatgattgctttgttagtatgcttgaagtattattgttcttatgtcaaaattaaactttttgtcttgaatcatatggatctgaatattcatgccacaatatatgttaggtagcattccacatcaaaaattctgtttttatcatttacctactcgaggacgagcaggaattaagcttggggatgcttgatacgtctccaacgtatctataattttttatcgttccatgctattatattatcaaatttggatgttttatattcatgaatatgctattttatattatttttgggactaacctattgacctagagcccagtgccagttcctgttttttccttgtttttgacctttttcagataggaatatcaaacggagtccaaacagaataaaactttcaccgtgattttttatggaaaatatcaaaaatactagaagaaaatttaccagaggggagtcccaaggaagccatgagccagggaggcgcgcacacccccctgggcgcgcctggggtctcgtgactccctcgtgggtccctctgacttgttctcgacgccatctcctcctataaatacagaaacctccagaaataaacctagattaggagttccgccgccgcaagcctcttatcggattgagtctttaagaacacttgatgtatgtcttgcacgtgtctatctgtggtgacaatgggatattcatgtgagtacttgatgtatgttttggtgatcaacttgcgggtttcgtgacctcgggaacctatgcatatgggttggcacacgttttgactctccggtagaaacttcggggcactctttgaagttctatgtgttggttgaatagatgattctgagattgtgtgatgcatatcgtataatcatgcccacggatacttgaggtgacaatggagtatctaggtgacattagggtcttggttgatatgtgtcttaaggtgttattctagtacggactctaggatagattgaacggaaagaatagcttcgtataattttactacggactcttgaatagatcgatcagaaagaataactttgtggtggtttcgtacccgacaataatctcttcgtttgttctccgctattagtgactttggagtgactctttgttgcatgttgagggatagttatatgatccaattatgttatcattgttgagagaacttcactagtgaaagtatgaaccctaggccttgtttccacgcattgcaataccgttcgtgctcacttttactattagttaccttgctgtttttataatttcagattacaaaaacctatatctactatccatattgcacttgtatcaccatctcttcgccgaaccagtgcacctatacaatttactattgtattgggtgtgttggggacacaagagactctttgttattcggttgcagggttgcttcagagagaccatcttcatactacgcctcccacggattgataaaccttaggtcacccacttgagggaaaattgctactatcctacaaacctctgcacttggaggcccaacaacgtctacaaggagaaggttgcgtagtagacatcagggagcagaggagcaagcatagcacatggcctgtgactctatgtatgtataaccttggttgtgcatgaagtggaagttcattatgatgctggtgctcatccaaggccctaggcaacccggcaatgacattgatgtgtacctcgggccattagttgatgaatttttatagctatggaatggaaatggtgtacatgtgtggcatgaaaacaaacaagaggaatttgacctacatgcgttgctatttgtaaccatcaacgattggccttctctcagtaaccttttaggacatacaaacaagggatacaacacatgcacatgctgtttagatgacaccgacagtatatatttggacaaatgcaggaagaatgtgtacctgggtcatcgtcgatttctttcgaccaaccagcaatgtcgaaagaaaggaaagcatttcaaaggtgaggcggatcaccagaagaagcccgccctccgtattggtgatcacatacttgatatggtcaatgatttacaagtaacctttggaaagggtccaggcagactatccgttccgaatgatgcgcacccatgtggaagaagaaatctatattttgggacctaccctattggaaagacctagaggtccgctctgcaaatcaacgtgatgcgcgtgatgaataatctttgcgtgaacctgctaggcctcttaggagtgtacgggaagacaaaagatacaccagaggcatgggagtaacatcaacgtgtgcacgaaaaagacggcatgcatccaaagtagtatgaaggtcctgccagctatgctcttaccaaagaagagaaggaaatcttctttgaatgccttctcagtatgaaggtcccctctggcttctcgttgaatataaagggaataataaatatggtagagaagaagttccagaacctaaagtctcatgactgccacgtgattatgaagcaactgcttccggttgcattgagggggcttctacctggaaacgttcgattagccaatgtgaagctatgtgcattcctcatgcaatctctcagaaggtgatcgatccagaaatcctgccaaggttaaggagtgatttggtttaatgtcttgttagttttgagctggtgttcccaccatccttcttcaatatcatgacacacgtcctagttcatctagtcgacgagattgtcgttctgggccctgtatttctacacaatatgttcccctttgagaggttcatgggagtcttaaagaaatatgttcgtaaccgcgctaggccagaaggaagtatctccatgggccatcaaagagaggatgtcattgggttttgtgttgacttcattcctaaccttcagaagattggtctccctcaatcgcagtatgaggggagactgactggaaaaggcacactaggagcggtttcaataatatgtaaggacgggcattcttggtctcaagcacactacacagttctatagaattctaccctggtgaccccgtatgtcgatgaacacaagaatattctatgctctaaacacccggagcggtgtgacgactggattacagatgaacacatcacgactttcggcagttggttgcaaaaacgtctcatgtgtgacaacactgtttctgatgagctgtactcatttgccaggagaccatcttcgactgtattgacttgggtacgagataaatgagaatacattttacacgatcgcccaagatcaaaagagtaccaaccaaaatagcggtgtccgctttgatgcagcaaccaagaggggaaaggacacatattatggttacatagtggacatatgggaacttgactatggacatgatttcaaggtccctttgttttagtgcaaatgggtcaatctgtcaggaggcggggtacagatagacccacggtacggaatgacaacagtggatctgaacaatcttgggtacacagacgaaccattcgtcctagccaatgatgtggcgcaggttttctatttgaaggacatgtctaccaaaccgagaaaaagaaaagataaggaagcgaatacatcatacaatgagccaaagcgccacatagttcttttacgaaaaagagacatcgtgggattggagggcaagacagacatgtctgaagattatgaagagttacatgaaattcctcccttcaaattcaaggctgacccaaacaccctgttaaacgatgaagattatccatggttatggcgcaaaaatcaaagaacacaagcaaagaaaaagtgaagaaatgaaatgccttttgtaatagatgagttatcgtatgaaaccatgatactttgaaagagattgtccgatttgtacacgaagtgcatcctgtttatgtcataaccctctcaactttttagcacatgctatgtgggtgaaatgatgataccatgccaactttcaacattttcagagttcatttgtagtgcctttcaatttaagggtcatttagctcagaaaaattagtaaatgcatgaaaaataccaaatgaagtcagaaattgttgaaaattgatgatgtggctttgaattgtgcattttgaacacacaaaaagtctggagttcaaataagttcaaaaaaatgaaatccctttgtaatagataagttttcgtatgaaaccctcatacttcgaaagagattgtccattttgtacacgaagtgcatccagtttttgctgcaaccctctcaattttttagcacatgctatgtgggtgaaatgataataccatgccaactttcaaccttttcagagttcatttgtagtgcctttcaattcaagggtcatttagctcaaaataaatcagtaaatgcataaaaaaataccatatgaagtcagaaattgttgaaaatttatgatgtggctttgaattgtgcattttgaacacacacaaaatctggagtttaaataagttcaaaaaaattaaatccctttgtaacacatgagtcttcgtatgaaaccctgatacactactggaatccagtaatttgccatcaacgagttctttgccgtctgctggctgatggcaaagaagatctttgccgtcagctgacctaaagcaatcggtaaagggctgattgatggcaaacagactatttgccatcgatgagtcatttgtcgtgtgccagcggacgacaaagagacctagggcagacggcaaagaggacagatgggtcccactggaccttgggcctggccaggtccaatggacgggctctttgcagtccacctggcctttaccgtccaccgtggggctctttgccgttcgggggcagacggcaaaggggacgtgcctataacggccgtccccccggcccctcactccattaccccactcccccactctctctctctccacccgcgtgcgtgcctcgatccagcaccatcggcggccggccacccctccaccgcccctggcaccgcccccttccctcacccacccccggcgctgccccctcccctcaccggctccctgcgtcgccccctcccctcaccggctcccggcgatgcccctcccctcaccggctcccgacgacgccccctaccctcacctgccccggcgtcgcctcctcccctcaccggctcccgacgccgcccccttttcgcggctcccccctccttcggccgcctcggccgtcccccactccgatgagtgcctctggtacccctgtttttttctgttttttcttttaaattagatagttaatttagatacttagtttattttctattttttctattaaattagatagttagtttattttatgtttttcttttaaattagatagttagttttttctatttttttgttaatatagatagttagtttattaggtagaaaaaaatagatagaaaagaaaaaaatagatagaaaagaaaaaacttagaagaaaataagagaagaaaaaactagaagaaaaaagaagaagaagaagaagaagaagaagaagaagaagaagaagaagaagaagaagaaagatgagaggaggagaaagagaaaagaaagaagaagaagaagaagaagaagaagaagaagaagaagaagaagaggagagaagagaagaaagaagaggaaaaaaggtaaagaaggggaaaaacccgacatgacaccccgacaccctgacacgatgccccgacccgacaccccgacacgatgccccgacacgacaacccgacaagacgccccgacacgacggtccgacaccccgacactataccccgacatgatgccccgacacgacaacccaacacgacaaccagacaagacgccccgacacccagacactataccccgacacgatgccccgacaccccgacatgatgccccgacaccccgacacgatgcccagacacgacaccccgacccccgacgccaccgacacccgacaccaccgaccgtcgacggcactgactcccgacgccactgacccccgacccccgacacctcttctgcctcctgttgaacgagaaggtgctttttggccttccagaggccggcgagatcatagttttgtaaattatgagttaggtcacatattttctgattatgttataaaaacatcatatttgtgttgatcgggtgaatttcaatgtgcagtttttcgacagcctccccgtgcgttggacgagctccgcctctgcgtttgtgggtgagcacaaatgacttctcctcctacccccttaatttgctctgtctcggtcctcgtgccgatgaaacttgctagctataggtttcttcaatcatcagtatgcgtgaccagtatgtgtcgcctgttcgaaagggcggcatctataagtatgcatgtctttgcatatttataaccgccatcctttcaaattgtccaacgttatccatggacagcccgagtatgtgtagattgggttcgttttcccgtatgctctgcaccggatccgatgcagaattttgtcaatgcctccctattgttcttcgggtacacatcctctctgcttattgtcgagacatgtagcaggagaataacggggaggtgctcccgaaattcggcatcggatctggagcagagcatgggaaaatgaacccaatctacacatactcgggtgggattacgatctatctctacttattagcgtgtaggttgcatggacgtaataaagctgacaaacttgattagcggatgaatatagatgatgaattatatatatatttcttttgtgtccataggttggcaaaatgagtgattgtgttaggatgtacactggtcaccctagtcagaaagacatgaccaatgaatggttaacaaaaaccagggggtttgtgagagccgcatttgcaaatggccagcaaaaaacatattgcccctgtcccaacaacgacaactagaaaaagcagagagagtttgaaatgggtaaacacctacagaagtcgggttttatgcctaattacacggtgtgggcttttcatggtgagtctaaccaacgtgccacagctgaggtggttcctcgtcgcaccgacgagcatggtaccgggatcaaagacatggtgcaagactttgatgatgctcgggattcgaacgatgagatggaggaatctacaaaggccttctataaattgttggagacttcaaaacgtcctctccacgagcacactgagctttgtcagctggatgccatcacgcaagtaatggctctgaaggctcaagtcaacctaggcagagaatgctacgacacgatgatgacgatatttggacgctttctacccaaaggccatgtactgcctgcaaacctataccagtcagaaaatatcctccgtgtacttaagatgccctatgagtattcgtatgaaaccctcatacttcgaaagagattctccgttttgtacacgaagtgcatccagtttttgccgcaacactctcagtacatgctatgagggtgaaatgatgataccatgccaactttcaaccttttcagagttcatttgtagtgcttttcaatttaagggtcatttagctcaaaaatatcagtaaatgcatgaaaaataccaaatgaagtcagaaattgttgaaaattgatgatgtggatttgaatggtgaattttgaacacacaaaattctggagttcaaataagttcaaaaaaatgaaatacctttgtaacagatgagttttcgtatgaaaccctcatacttcgaaagagattgtccgttttatacacaaagtgcatccagtttttgacgcaaccctctcaatttttaagcacatgctatgtgggtgaaatgatgaaaacatgccaactttcaaccttttcagagttcatttgtagtgcttttcaatttaagggtcatttagctcaaaaaattcagtaaatgcatgaaaaataccaaatgaagtcaaaaattgttgaaaattgatgatgtggatttgaatggtgcattttgaacacacaaaaagtctggagttcaaataagttcaaaaaaatgaaatgcttttgtaacatatgagttttcgtatgaaactctaataattcgaaagagattgtcagttttgtacacgaaatgcatccagtttttgtcataaccctctcaattcttttagcacatgctatgtgggtgaaatgatgataacatgccaactttcaaccttttcagagttcctttgaagtgcttttcaatttaagggtcatttagatcaaaaaaatcagtaaatgcatgaaaaatatcaaatgaagtcagaaattgttgaaaattgatgatgtggatttgaatggtgcattttgaacacacaaaaaatttggaggtcaaataaattcaaaaaaatgaaatgcctttgtaacagatgagttttcgtatgaatccctcatacttcgaaagagattgtccgttttgtacatgaagtgcatccagtttttgtcgtaaccctctcaaatttttagcacatgctatgtgggtgaaatgatgataccgtgccatctttcaaccttttcagagttcatttgtagtgcttttcaatttaagggtcatttagctcaaaaaaatcagtaaatgcatgaaaaataccaaatgaagtcagaaattgttgaaaatccataatgtggatttgaattgtgcattttgaacacacagaaagtcaagaacaaaacacaaaaactagatttttttttaaataccacctactgggccaccacggcctgaatacgactagaaacacaaccagggccaggattcaggcccgtagaaggcccattaggcccactggcagcggaagatttggtctgttagcctgcagttgagaggacctcgaaatggtctgcgcagcggcgcttataaaccactcgtgagctctctcggctagcgaggtgggactaaaaatttggccccggacagtgctacttctcgagcttgcgttggtttttcccttgaagaggaaagggtgatgcagcaaagtagaagtaagtatttccctcagtttgagaaccaaggtatcaatccagtaggagtatcaagatgaggcgccaagacacctgcgcaaaagcaacaaacttgcacccaacgcgacaaaggggttgtcaatcccttcacgattgtttgcaaagtgagatatgacagagacaaaaggtaaatagatctgaaagtaaaagatggaaaatagacccgggggccatagtgttcactagaggcttctctcatgatagcaagtattacggtgggtgaacgaattactgtcgagcaattgatagaatcgcgcaaagtcataaagttatctaaggcaatgatcatacatataggcatcacgtccgagacaagtagaccgatactgtttgcatctactactattactccatacatcgaccgctatccagcatgcatctagtgtattgagttcataacaaacagagtaacgctttaagcaagatgacatgatgtagagggataaactcatgcaatatgacataagccccacctttttacccttgatggcaataacacgatacgtgcctcgctaccccttctgtcactgggtgaggacactgtacggtatgaacccaaaaccaagcacttctcccattgctagaattatagatcaagttggccaaacgaaaccaataactcgaagagaattacaaggatatgaaatcatgcatataagaaatcagagaagactcaaataatattcatagataatctgatcatgaatccacaattcatcagatctcgacaaacacaccgcaaaagaatagttacatcgaatagatctccatgaagatcatagagaactttgtattgaagatccaagagagagaggaagccatctagctactagctatggacccgaaagtctgtggtgaactactcatgcatcatcggagaggcaatagtgttgatgaagaagccctccgtgtccggatccctctccggcagagtaccggaacggtctccagatgggatctcgtggagacagaagcttgcggcagcggaaaagtatttttgtggctctcctggctggtttcacgatttatcagaatttataggcggaagaagtagggcagagaaggcacgtggggcccacgagcctgcagggcgcggcctccccctgggccgcgccctatgggctcgtggcctcccacgtggccctctgttgtggttctcacgtctgctgcatatcttctgttatggaaaaaatcttcgcgcaggttttattccgtttggactccatttaatattcgcatctgaaaaaggtcaaaaacacgaaaaaacagaaactggcactgggcactgagttaatagattagtcccaaaaaagatataaaatagcatataaatgcatatgagacatcccaagttgatactataatagcatggaacactcaaaaattattgatacgttggagacgtatcaagcatccccaagcttaactcctgctcatcctcgagtagggaagtgataaagaccgaaattttgatgtggaatgctacctagcatgtttgttctttgtaactccttcattgtggcatgaatgttcagatccataagattcaaaacaatagttcaatgttgacatgaaaacaataatacttcgagcatactagcaaagtaatcatgaacttttgaaataacaaggcaaaagaaagttatccctacaaaatcatatagtatggctatgctccatcatccccacacaacgaatttaaattatgcacaaccccggtattggccaagtatttgttttcgcactcttactttctcaaactttttgaactctcatgcaatacatgagcgtgagccatggatatagcactataagtggaatagagtgtggtggaggttgtgaggcaaaaaggaggagatggtcacattgactaggcatatcaacgggctatggagatgcccatcaatagatatcaatgtgaatgagtagggattgccatgcaatggacgcacttgagcttataactgtatgaaagctcacaaaggaaactagtgggtgtgcacccaacttgcttgctcacaaagacctagggcaattttgaggaagcccatcattggaatatacaagccaagttatataatgaaaattcccactagtatatggaagtgacaacataggagactctctgtcatgaggatcatggtgctactttgaagcacgagtgtggaaaaggatagtagaattgtcccttctctcttttctctcattttttgtgggctctttggcctctttttttggtgggcatctttggcctcttttttgtatatgggctttgctggcctcttttatttcctcacatgggacaatgctctaataatgatgatcatcacacttttatttacttacaactcaatacttagaacaatgatgaacctatatgaaatgccttcggtagtgtaccgagatgtgcaaagatctaacatagcaatgatatcataaaacggacaagccatgaaaacatcatgctagctatcttacgatcatgcaatggcaatatgacaatgatggcacacgtcatgagatggaacggtggtagttgcatggcaatatatctcggaatagctatgaaaatgccataatagttaggtatggtggttgttttgaggaaggttatatggtgggtgtatgcaccggcaaaagttgcacggcaatagagaggctagcaatgatgaaaggtgaaagtgcatttataccatggactcacattagtcacgaagaactcatatacttgttgcgaaagttttattagtaatcgaaacaaagtgctaaacgcatactcctaggggaagggttggtaggtgttaaccatcgcgcgatctcgaccgctacacaaaggatgacaatcaataaatcaatcatgctccgacttcctaacatagtggttcaccatacgtgcatgctacgggaatcactaaattcagcacaagtatttctagattcacaacaccctactaacataactataatattaccataaccatatctcaaaactaattatcaggaatcaaacttctcttactaatcaatgcacttgaatatgaaagtttttattatatcctctttggatgcctatcatacttaggactaatttcatagcacatgccaaataccaagtttcttaaaaagagcactctcaagaagatataagtgaagatcgagagtttctatttctacaaaatatgccaccgccgtgctctaaaaagatttaagtgaagcactagagcaaaaaaatactagctcaaaagatataagtgaagctcatgggagctaaattgcctagctcaaaagatataagtgaagctcaatgagtattctaacaaattcacgatgagtgcatgtctctctcaaaaaggtttgcataaaggatgattgtgacacaacaaaaagcaaagactcctataatacacgacgctccaagcaaaatgcatatcatgtggtgataaaaatatagctccaagtaacgttaccgatggattgaagacaaaagaggggatgccttcccggggcatccccaagcttaagctttttggtgtccttgaatttgactttggggcgccttgggcatccccaagcttagtctctttccactctttattccattgtccaaaagatcatcacccaaaacttgaaaacttcacaacacaaaactaaagcagaaactcgtgatatcattagcacaagaaaacaaaccaccaacttactaggtactgtagtaaacttgatttccatttagattgatgttatactactatattctaacttttccatggctcgtacccgccgatactatccatagtttcatcaaaacaagcaatcaacacaacaaaaatagaatctgtcaaaaacagaagagtctgtagcaatttgtatattccgtatacttcttctatctcaaaaattctaaaacattatgacaatctgggaaattttcatatcaatcagcagaaaaaagaataaactcaaaatctctttctggaaaagaattaaaaataatttcgtgagcccaaagtttctgtcttctctccgcatgatcaaacaactatcaccaagactaatcataaaggttctacttggcacaaacactaattaaaacacaaaaaacacaatcataacagaatcatgaaagtgtggactcaacaaaacataaagcaaaaaagcaaaaataaatctaatcattggtttgcctcccaacaagcgctatcgtttaacgcccttagctaggcagaaggcgatagaatcaagtgttgtcatctttggtgctcaaaccataagtagccctcataatgtattcataaggcaatcttattttatttctaggaaagtgttccatgccctcatcactattagggagttctttaactttaccaataatgatactcctagataggcaacaaagataatcattagtgatgatagggttttttgagacaccaagataggtagggtgaacactcaacattttaagatcttcatctctcttacaagatggttcactatagtttttaggaacataaacaagcttagtggccttgttgtgggcagaatttggagtgctttggacagcagcaaaagcggaacccaagttagttataacatcctctagtttgtcaattctagcgaaatcatgatctagtttttcgttaactatgggttccttctccttaaaacatttcaaagtcattcccaacttggatccatattaagtgattttattgtggatctttttatccaaattttcaatgagctcaatcgtagcaactttattttcaatagcatccagcctacgcatcacatgctccaaagttaaagtagttccattaaccatgagtgggggtgagcctaacaaatttattaaagcaccataagaatcaatggtatggctacccaagaaatttccacctgcgatggtgtcaagaacatacctattccaaggggaaacacccacataaaaattgcgaagtagaacggtagtagattgcttacgagtagctctagtctgagcgttgcaaattctataccaagcatcctttaagttttctccctcattttgtttaaaattaagcacttcgctctcgggagtaacagcaataggagtagccataaggatgagtagactatcccgcacaagcaaacgaaaagcaagcgaaagaaagggcgaaaaaaggcaaatattttttgtaatttttgttttagaagtgggggagaggaaaacgagaggcaagtggcaaaaaaagtaaatgcaagagatgagtttgcgagaggtacttggtagatgtgcttcacttgaacactccccggcaacggcgctagaaattcttcttgctacttctcgagcttgcgttggtttttcccttgaagaggaaagggtgatgcagaaaagtagaagtaagtatttccctcagtttgagaaccaaggtatcaatccagtaggagtatcaagatgacgcgccaagacacctgcgcaaaagcaacaaacttgcacctaacgcgacaaaggggttgtcaatcccttcacgattgtttgcaaagtgagatctgacagagacaaaaagtaaatagatctgaaagtaatagatggaaaatagacccgggggccataggtttcactagaggcttctctcatgatagcaagtattacggtgggtgaacgaattactatcgagcatctgatagaatcgcgcaaagtcataaagttatctaaggcaatgatcatacatataggcatcgcgtccgagataagtagaccgatactatctgcatctactactattactccacacatcgaccgctatccagcatgcatctagtgtattgagttcataacaaacagagtaacgctttaagcaagatgacatgatgtagagggataaactcatgcaatatgacataagccccatctttttacccttgatggcaacaacatgatacgtgccttgctaccccttctgtcactgggtgaggacaccgtacggtatgaacccaaaaccaagcacttctcccattgcaagaattatagatcaagttggccaaacgaaaccaataactcgacgagaattacaaggatatgaaatcatgcatataagaaatcggagaagactcaagtaatattcatagataatctgatcatgaatccacaattcatcagatctcgacaaacacaccgcaaaagaatagttacatcgaatagatctccatgaagatcatggagaactttgtattgaagatccaagagagagaggaagccatctagctactagctatggacccgaaggtctgtggtgaactactcacacatcatcggagaggcaatggtgttgatgaagaagccctccgtgtccggatccctctccgacagagtaccagaacggtctctagatgggatcttgcggagacagaagcttgcggcggcggaaaagtatttttgtggctctcctggatggtttcacgatttatcagaatttataggcaaaagaagtagggtagaggaggcacgtggggcccacgagcctgcagggcgcggcctccccctgggccgcgccctgagggctcgtggcctctcacctggccctctgccatggttctcacgtctgctccgtatcttctgttatggaaaaaatcgtcgcgcgggttttattccgtttggactccgtttaatattcgcatctgaaaaaggtcaaaaacacagaaaaaacagaaactggcactcgcactgagttaatagattagtcccaaaaaagatataaaatagcatataaatgcatatgaggcatcccaagttgatactataatagcatggaacactcaaaaattatagatacgttggagacgtatcagacagcaccactctttagtcctggttggtggctgaaaccggtcctttagtcccggttgtatccaccaaccgatactaaatgtctcttcttcccgcccttttggctgctgaaaattgatctttagtcctggttggtggctccaactgggacaaaagggggcattggtcccggtttcagccacgaaccggaaccaatggtgttcatatatggcgggaattatcgaaatttccactaacttccagttcccccgttctctcctcgtcgtcgccgtcgcccctgagcccgtcctaaccgccgcaccgagcgtgtcgtcgtcgccgccccgagcacgtcgccaccggcccacacctcctccacgagcccgttgtcgccaccgccgtcgacccagagcccgtcaccgccggcccgcgcctcctccacgatcccgtcgtcgccgtcaccatcgaccccgagcccgtcgttgccatcgccgtcgaccccaagcccgtcgtcgccgtcgccgtcaccgtccaccccgtccccgtcgccgtctaccccgagcccatcggcgtcgcccccaagcctgtcatcgtcgagcagatcatcaccgtcattgtcgcccccgagcagattgccgagcccgtcgtctacgaggaaatcgtcgtcgcccccgataagatcgacgttgccgctggcccgcgcctcctccccgagcccgtcgttgtcttcacccgcgccaccccgagcccgtcgtcgtcgtccgcgccaccttgagcccgtcgtcgtcgcccgtcgtcacccggagcccgcgccaccccgagcccgttgcagcccctcgcccgtgtgtttgtacattttccattattcactatgcatttttgtacattttcaaatattcactatacattttcaaatattcagtacgcattttcaaatagtaaagtaggactcatatctactccatggatgaactaaactgtaacgccccggacacacccgtcggcggtcgttactcctggcaggatctagactggcctcacatatcaatactagtcttttctgcgcactttgtcctcactcatgcgcacccgggatcaacttcccggtcggtcacccatcttagaactactccaagctgagcacgcttaacctgagagttctgttcgaatgggctcccggaaaagaaggaattccttattgatatgagtagtctaacatccctaataagccaggctatcacatacaccaccactcagaggaaccgacgtcctcgtcgggccacaggagcgttccctcttggcacaaacgtctgtacatccagtccagtacatgtaccatgccgtgtgccacgacgggtcacaaacgtcatgaacaacatgaccgcacacctgtccgcaaacatccgtgtaaccgcgagggtcgactctgataccaaacttgtaacgccccggacacacccgccagcggtcgttactcctggcaggatctagactggcctcacatatcaatactagtcttttctgcgcactttgtcctcactcatgcgcacccgggatcaacttcccggtcggtaacccatcctagaactactccaagctgagcacgcttaacctgagagttctgttcgaatgggctcccgaaaaagaaggaattccttattgatatgagtagtctaacatccctaataagccaggctatcacataaacacacccctccaaatagtgatgagacacggtaggtcgctgcgcgactgcaacccgagcttgccgcctcggcattgtctgtttaccccatccatcagctctcgctccggtggtgagctcgctcaagacacctccctctgttcaacctcgactccggtattcaacacccatctcgccttcccgccattacctcgtcctcccgtcgtgtgcttgtcgcccgacgtcattctctgctcctgccattagccactaccgaatcaggcaccaccacgtaccatcttccgcatgcacagagacacaacctccgtctggacacactcgctgatccatggatgtatgcattgatgatccatggatgtatgcattgatgatccatggatgtatgcattgatatatgattaatgatgttcatagaaagtttttgttcatagaagaaagatttttgtttatagaagtaagttttttgtatagaatccgttgtttgacattcatgagagaggcggtccggacgtcggacattcatgtttgtatattaattgccatgttgtaatatttgcagaaactatggatccaagagacttggaacaagaacagttgttgggggatataatcctcggcggaggtgatctctatttgtttctcaacgacaccgattgtctggaaggagaggatgacggctccgctcatcaaacaatggaggaggaaggacatgatcatgatggctccggtgactgaatcccagaggaaggagaccatgatgacggctccggtgatcgaacggaggagggagctgttgcaaagtctggatcaagccaaacttcggtaacgagacgaggcccgaagagaaggttgggcaaatatgaaaagttcacgatcactacactcgcggacgatcgcctaccgattctacccaagcggaccaaggacgcattttctgctcagtgtggagctattgttagggacaacatcccaatcagcatcaagcaatggaataagcctaagggcgatgacgtccctcaaggtgattatgtcaccgataggcagaaagatgatctttggaccacggcgaaggaaaatttcaccctaccaccagaggaggatccgaataagccagttatggagccactgatcaaggtgtgtgctcttaagaagatggcagatctattcaggaggtggacgaaagagttgaaatcaaagtttatcgacaaaagggaagactccagaattcatcggcgatttgacaaaatgagagatcactggcccgcatttgtggcctacaagacatggaacaacaataagaaaatgtcagagacaaacgagaacaatgctgcaaagaagtagcatcaccatcgcacagggtcaggtggctacctcaaagcccgtccgttgtgggacaaagctgagaatgtcgtgatggctaaaggggtcgaaccacagacattgaactggccaggcgtttaaggacttggttcttcggggttgggggaactgtggaccctgaaacagggaagtgccattggacgaacgagcaatttgcaatacccatcaagaagctggagaagtatatcgccgcagcgcaggaatggacgttcattcccgacagagagaaggacgagatgattgaggccctagggaatgctgagcaccctggacgaacacgagggacaccaggcttcgttccatggaaggttgggtttcccgacgcaggcggttacagaagccgagagagaaagaggaaagtggagctgagcgacatgcagaagatcaatgcaagactacaaaagctagagcaacttgagagccagcgagttgtcggccaaccatctcagtggcacaaagctacccctgaagctcaatggagaagcagcgttacttccacagagctggttcagcctgacttcacagctcctagataccccgtggatactatcacggaggctcaacattgcgagcttatgacgaaatgttgaaacctcactttcaaggcggctattggctctgttgcacctcctaaacccaacagaacttttcactgccttccgattccacatggctatgatgttgtgatggtggatcaagtaatagagggatttgaggagctcgagcttgaccaccctacaggtgaaggggagaatcggctggttcatgctctgaggagtacatgtctatggtagaagtacatcaagcttctaaactggacgcctccgcctcctcctcctcctcctcctccggaaagtcaaggcacacctcgtcatcctcctcctccgacgagtgatcagggcactccgcctcctcctcctcctcgtccggcgagtgatcagggcactccgcatcctcctcctcctcctcctccagcgagtgatcagggcactctgcctcctcctccgacgacgatgacgagtgatcaaggtactcctcctcctcctcctcctcctccagcgagtgatcaggccactccggctcctccgacgcatgagggcactccgcctccttcttcggctcctcctctgacgcatcggatcagtccgcctcctcctccgcaatggaggaagatagacgtcgcagctccgactcctcctacaattacaaaaaatacacatgctccaaagaaaattatgcatgagggcactccgcctccttctctcaagtggaagagggacgcgccgctccggcggctagcagtgatgcaaggttagcagaatgaagaagtgggaaaacaattccccagctcagccaacacgagaagcaatcgtgccccccgctcaaggtgtctagcgatatcgtcgtcgctaatcctccagggacgatgctgcccggtaccaatccttgtgattacttgggggatgatgtgatttttgaaatggctgatttaaaacaatataaatacatgcacgggaagcctctcgtcaaacctggtcatcctcctctaacaacaatgatgcacaaattgcatgagtggtacatggaaacctgcagggagtctgggaaagacactatatatttgaaagtgaaacaagagcacgaattcattggagctgaagtgatgcctattgaatttgaggagttatttcagttatacaatcaactggccctcgacaaacaactcttgacttcctactgtttgtaagtattacttctatagttaagtctctgctagctcaactcgttcattgcatgtatatataattattgtactatatatattatgcagattgaagatcgtcaaattacaaaaagcaggaatcttcgatgttgggttcattatccagatgtcgtacatgaatattcagtacgaaacatgatcaaagacacggaggagaacttgcaaaactcattccttaaacatcaaaacaaaaggaaaatactctttccttacaacttcaagtgagtgttgctgtcttctctgtatactcggtttcgcttactcgaggttaagtaatgtaattgatgagttatatatgcgtgcgcagattccactttattatgctatccattaagcttgatgaggcattaataactgtcttagactcgagacataaaaatcccaatgattatgtggacatgactgcaatgctagataagtaagttcagtcaataccgggaccatattggcatgcaactttcgttaatttcctgatatcaaataatcattttctttgcgtggcatggtttggaagaaattcacgagaaaggtttgcggtatacccaaagatttgcgatttaggcaccccaacgtaagaagtactagctagttccgcgcatctctaattgattcaaaatttcatcaatatatcattaccgtgcttgcttatcagtttgattgaactctattctcgtaaagtgcttgtaccggttagaagggactgatttatgtggatactacgtatgcgagttcattcgcttctcgacctttgagcggacgggcttatctgagaaacaatatcaagtacgtaaataatattcacaatttattttatatattatcatcaattgtgttgagttttattcatatatatgcatgtcttgaccccctttataaattagacctggcagatgcggcatgatatcctaacacatgatcacataggagcaattcaagaggaattggtgggatcctttgttaaccacatcatacctaaagacggagaatactatgtggattatttgtgattggatcttatatagatgatgttagggattgtaaaagatgttatattgtatatatgtagtagcgtcggatatatattgtaaaagatgttagggattgtcaatggtttccctcattttcttattagctagcctcaagttctctctatatgtatagtagctagcgtcgaccaagtgatacgtccctaacgtatctataatttctgcttgttccatgatcttttgggtgacattgttatatgttttgcaacacttttatatcattttacacatatttcgactaaccaactaactcagtgcacccagtgccagtttctgtctgctgatgtcttttttgcaggggcatttacccaattttccaaagctcgaaaaaatccgagaaaaatatataaaaatcagcgtgacgggaactccaggatcaccgaaggggggcagaggggggctagggcctgcacaggcggcctgcctgcgtggcctggcccctagtcgcaccaccaggccgcctgggtagggcccacaccctctggtaccctcctttcgcctatatttacccctcgacgaggaaaaccctccagaggatccagaatcgcgaattcctccaccgttccgccgccacagcgcattcaagatcgggagcgtcagaagacctcttcccggcaccctgtcggagggaggattgatcttcgggagcttctccaccaccatggacgcttcccggacgtgtcgtgggtagtcctcgttggaccatgagtccatgaccagaagctatgtgatgtcttctctccaatcttgtgcttcaatggttagtccttgtgagctgccctacatgatcaaggcatatatgtaatcctcttgctattgctatgttgagtttgatgggatcgatggattatgagattatgttcagattgttatgagttatatatttggttctccttttatattatgttcttagtgattcatgcatgttctccgttaccttttattgcattggccgaattgtagattgtaactccaagagggagcattatgcatgattgtgggttcatgcccctcgatatctagattgagtgatagaaacatgagtccaggggatgtgctgttgcctccagggagaaaacaacggtgtttgtaaccatggttgcaaggattgtttaccttatgcatagttcgttaatgcagttgtccattgctttgagtttacactttgggtgggactcgcaacttaataccagcgagatgttctcgatagatatctcaaggtggatgattagtaagtagatgttgatgaataaacggtctacttgtctgggcgtactgcccattacttttgagcctcaaaacaatcaaggagcatggttagcattgcggtgcgtttataattctgtcaattgcctatctgtaattcgtttacctcgcatagttgtttatcatcttttgggagaaagacatcactagtcaacatcatgacactccggtccatatttccaccactgtttacacctccatcatttacagcttatttactttcccattgcaagcaccattactattcccgcttgtgttttgatcctttgcaaactacaaggccggagagattgacaacctctttgtactcgttgggagcaaagttatttgttgtgtgtacatgtccacgtcctctgtaagtgccagagcagtggacaccaattgttgaacctcgtagtcctcctggttcgataaaccttacagtctccgtgtaagggaaacttgttgctgactacatctcaacctgcacttggggtaaccaacgagggggagagaagtatatacattctctcatcatcaagcaaagtttctggcaccgttgccggggactctagtcctcaagataggggagttgcacaccatcctttacctttgtttttcagtcttgttagtttgcttgctagtttttgctttagagtcttataccaaaaaccacaaaaaaattagttgctttgttcttgcttgttgctgctgctatgggttccactgagaacaccaagttgtgtgacttcactagtcacaacaacaatgactttatctgcactcctattgctactcccgccactgcggcgacatcctatgagattaaacctgctttactgaaccttgttatgaaagatcaattctccttgttggaaatatgccctagaggcaatgataaaatagttattattatatttcctattacaatataatcgtttattatccatgctataattgtattgattggaaacacaaatgcatgtgtggatgtatagacaaaacaatgtccctagtgagcctctagttgactagctcgttgatcaaagatggttaaggtttcctagccatggacaagtgttgtcacttgataacaggatcacatcattaggagaatgatgtgatggacaagacctaaactataaacgtggcatatgatcgtgtcagtttattgctactgttctctgcatgtcaatgtatctgttcctatgaccatgagatcatgcaactcccggacaccggaggaataccttgtgtgtatcaaatgtcacaacattactgggtgactataaaggtgctctacaggtatctcttaaggtgtctgttgggttggcatgaatcaagactgggatttgtcactccgtgtgacggagaggtatctcggggcccactcggtaatacaacatcacaaacaagccttgcaagcaatgtgactaaagagttagccacggaatcttgtattacgaaacgagtaaagagacttgccggtaacgagattgaaataaggtattggataccgacgatcgaatctcgggcaagtaacataccaaaggacaaagggaatggtatacgggattatgtgaatccttgacatagaggttcaaccgataagattatcatagaatatgttggatccaatatgcatatccaggtcccgctattggatatttatcgagaggtgtctcgggtcatgtctacatagttctcgaacccgcaagatctgcacacttaaggttcggtgatgtttcggtatagttgatttataggtgctggtaactgaagttttgttcagagtcccggatgagatcctggacatcacgaggagttttggaatggtccggtaatgaagattgatatataggtttgtttcatttggtctccggaaagatttcaggcattaccggcagtgtaccgagagtgacgaatgggttcgggagttttaccgggaggggcccacccaccctgcagtgagcccaatgacccaagggtggcgcagcagcccttagtgggctggtgaggccaccccaagtgggctattttggctaaggaagaaaaaacaaagaggaaaaagagaggaggtgggacaagagggaaggactcctccctccaaaccgaattggaggaggaattctcccctctcccttgggccgaacccttgggcctctcttgagcctcaaagcaaagcccctcccctatatatactcgaggttttgggagtttgagacacaactttttccacgtgcatcccgaagcatttacttcttagttttctttctagatcggatttctgcggagcttaggcgaagccctgcaggaataagatcaccaccaccaccggagcaccattacgctgccggtgaactcatcttcctccccgtctctcttgcgggatcaagaaggcggagatcgtcatcgagctgtacgtgtgctgaatgcagaggtgccatccgtttggtacttgatcgggacggatcgcgagacggttcctgggacggatcgtggggctgttcgtgggacggcgatttgaatcgcgaagacgtaccactacatcatccgcatttattaacgcttcctgcttagcgatctacaagggtatgtggatctgatctccctctcgtagatgatcatcaccatgataggtcgtgtgcgtaggaaaaattttggttcccatgcaacatttcccaacagtggcatcatgagctaggttcatgcgtagatgatatctcgagtagaacacaaaagggtttgtgggcattgatattaatttgctgccctccttagtcttttcttgattcagtggtattgttgaatcgaagcggctcagaccgacattactcgtacgcttatgagagattggtttcattgttaacatgcaatgtgttgcatgaaagatgactggtgggtgcctgtttcttcaactttagttgaatcggacttgaccaaggtggtccttggagaaggttaaatagcaatttgcacatcaccattgtggcttttgcgtaagtaagatgcgatcatactagatacccatagcagccacgtaaaacatgcaacaacaaattagaggacgtctaacttgttttgcagggtatgcatgtgatgtgatatggccaacgacgtgatgtgatatattggatgtatgcgatgtatcatgttgtaatagttaatatcgacttgcacgtcgatgctacggcaaccggcaggagccatagagttgtctttaaactaacgtttgtgcttgcagaagcgtttactatattgctaggcagtagctttagtagtaatagcatagatgtggcaccccggctcagaggaaaccggaaagccccgtattctagcccaaggacgagtcttctggaatacggaaccgttggcggaaaacaaatcagctctttattactatggaaaggattacaatgatacattgattacttcgccttggcgatactacacctgcctacggtaaatcctacactagcagtggaacaaccacggatgtgttgaactccactccgcagggactctggctggaatgcgcatcctagctcgtaacttggaatcttcgacaatcaagcaatcaaggcatgacctgcaaactggcatgacaagccaggtgagtactttgaatgtactcgcaagctcacaacaaacattagcattaaggtaaaacaacatcacagcagtcagaattaagcaaagatttattatcacaaatgggtagctgaaaataactataccagactactatcaccgtactctggtgataccaacacttatgatcttaccaagaatatttagcaagtatcctcaagatccagtatgaatctgatctaaatccaatcaaactcatgtggtcatccgaccactcatctcatagccatcccatggctaacatgtcatatactggacatcttccggtgtctgcacaagacgagttcttccatcattactatcatagttacggttgaccacttactgaggtctgggcgggctgttcattaccgtggactcggctattcgaatagatttgacactctgcagtggttgcacactttacccacactctagagcactgacctcgtgatcccattcgggtggaccagcattgctccaatgaaacttacctaaaccgtgaccctctcatcgtaccaccggcaaacactctcctctggagtcttgccctgggtggacctgtgtcctcatgacacctgccaccatcgtggctaaactaaactgtctcaaccggggacgggccctaacaattcaactgggctcacagggttatcactgcctacgtgatcagggtagcacgcgtgcataaccctccctctttggaggtaccggtgagagcgatcacatgaacagctcaagtcacggccgtcccatatctgcaaatttggtagaactgatgagcccggacaggtgactctgatcaaccaactaggttatctcatcctgaataatatatcagttatagctgacactccggtgtcacagcaatccgatgacagataagctcaaccattactgtggatccatagccataaaccgttggataaaataatcatagacagtaatatcatcatcgtggcatcgactagtgtgcaagacactagtcactaacgatccgtactcatcatagtagtcgtctatccaaacattgcatactcaaatcacaaacgataaccagatatacttgtgattgaaatagttaatgaaaccatgatattgcaatgcaattaagcaaatgagagttgtggccttcctgggatgggggaaaccaccagaaagaagtgcgagaaactcgcagaatgaatcgccggaaatagttctctctcggaggagggctgatttcggcaagggcaacatggtcattttccactatgtgatcacatggtggaagtggtatcatcttgacggactcgacgagacgaagatgtgggctttggaatcaccggaatcggagctacggttgcagagatatggacaaatgaagatcagggaccaatttgtaaaaataatctctacaagtaggcccctggctgaaaaaagaaagcgtatttggtggaatacgtttccaagagggggaaacgtattttagcgccgggcgcctccacttatccagcctggccggcgctctctcaccgacaggtggggtcggggcccacctgtcaggaccctccctctctctcctccctcactccttcttgttcctcgcagcggcagaggagggcacgacgccggcggtgaccccctgtggctccggccaccattttatgtgctctagccaccagcgagctcatggggccgagccgcacccgttcccgcatagcatgcatgccgaaaggctttagaacggcggcggtgtgacccacggcggacggcggctcgggaggtgcttgggcacgtcgctaccgtgcattggagatgaggctgagaggtgggagagggtcgccataccttcgcggtccctctcgtgaggttaggagggaggggaagagctcggggtgctccaatttaggcaagagccgaggcggacatggcggtcaatggagggagccggagctcctccagctcgggcagacggctgggaaggggcggaagagaaagaggagactcgaggtgagctcaaagggctctagggagggctataaatagccggtcatggggaggcgatgaggacggccgccgtggcgatctcatcttcgcactggaactcacagctgagctggctggacggtagcggcgtccagaagcttctgggatggatggggacggctccgagaaggcctgggaaggatcgggagagctcggcgacaggacgcgacggtgacagggacggccacgtcgcgggcacggctacagcaccgctcaggaggggacttgagaaggggagagggctccaaggagaagaggacagcgaggggaggctgttggacatgacgaggcgtgcggaaacgacgagcaaaggaggggcccgagctagcaaacacgtagctcgcgtccatggcatgccagggtggtggtcaccacatgcactggtgctgaggagacaagaggggctggcacaccttgtctggggtggagtccttggtccccaaggtagcctggaggtgatggatcactaaaggaagcactggggtgatgggagacttcactggaagattcctgcaatagacttggacaccacattgtgatcaacaggaaggtgataagagcaaactaccatgtgtgggaggtttagggtaggaggaactacaatcctgtgaagtttgaggatcaaaattggacagggttgctttggaacaagctaatctggtccaaaatagagattttgaagtggcactcacatcctggcttggattgagctgaaacttggaggagatgaatcatttgggcatgtgaggatgctgtataaatttcatgccatcttgataagcccaagtggcacttccttcacacagtttctcactggacaaaaacttagaagaattactaggaataattggctaaataaaatgatctcaaaattggtttagagaggttttatatataagagaatgtcctggaaaaatttcagaatttatggagcaacataaaatatagttgcttcacaatcccaaataatgaccagagacaaagaattgatgctgtggttatatagttgaaggagtgatgcttaaatttggtggagaggcttaatttgagcatattgagatgatggcaaagtttcaactcatttgaatactcctagctagcacttgcttcacaaagcttcctctggatcaaaaactttggaaaattgccaagaaatattcactagttaaattgagttgaaaattggcacgagtcaatgatatgaataggaaagagtgtccacaagttttgataccaagcaagcaaatggaaagggtacttgcttcacaacttgacagatagggaagaaacagaaaaggaattattgaggaatatttttgaacatggcaaggaaatattttgtcatatctgaggaagatatgacccaagagatttatgagaattatttgggaatttttggagagatataaatgggggttgcttcacaacgcaaggcaacagaggttattcctttaatagaaaaaggaatattcccatggaaaagaatattgggataggctcaagatggaaatggcaaggtcttgcgatggtttggaggttggcaagccactagggaaaaagaaatcaagggtaatccttttaggtttcaaaactatcaagccacaaaaagcaaaccagatccaaaatcaaaggaaaaagaaatgggcaaaatccagggtgttacaatagatagcacaacagccacgatggtggcacaatgatggagatcatgatgatggagatcatggtgcggcgccggtgactatggagatcatgccggtcctttggtgaaggagatcaagaagcacgagttcatggccatatcatgtcacttatgatttgcatgtgatgttaatccttttatgcaccttattttgcttagaacgacggtagcattataaggtgatctctcactaaaatttcaagataaaattgtgttctccttgactgtgcaccgttgcgatagttcgtcatttcgagacaccacgtgatgattggttttgatagactcaacgttcacatacaacggatgcaaaatagttgcacacgcggaacactcgggttaaacttgacgagcttagcatgtacagacatggcctcggaacacaagagaccgaaaggtcgagcatgaatcatatagttgatatgatcaacatggagatgtttaccattgtagctaaactcaactcacgtgatgatcggacttgagttagtgaatttggatcatgagacactcgaataactagagagatgtctatttgagtgggagtttattagtaatatgattatctaaactcaattatctagaacatattctaagtaatctttgcaatatttatgttgtagatcaatgcctcgtgccatagcaaccctcaattttaatacgctcctagagaaagctaagttgaaagatgatggaagcaactttgttgattgggctcgtaatatgaggattatcctcactgctagccaaaagaattatgtccttgatgttgtgctaggagatgcactacccaccacgtctgacgaagacgttttgaatgcttggcaagcacgtaaggaggactactcactagttcaatgtgcaatcttgtatggcttagaactgggacttcaaaaacattttgaacgtcatggagcatatgagatgttcgtggagttgaagttcatctttgagaagaacgcccggatcaagaggtatgagacctctgataagttctatgcttgcaagatggaggagaattcgtcggtcagtgaacatgtgctcagaatgtctgggtactcaagccgtctagctgagccggggattgaactcacgcaagaagctatcactgacagaattcttaaataactgccgcctagctataaaagcttcgtgttgaactataacatgcaagggatgaataagtcaccctgtgagctatttgcgatgctaaaagtcgcagagtcagaaatccaaaaagagcatcaagtgttgatggtcaataagaccactagtttcaagaaaaacgaaaaaggcaagaagggtaactccaagaagattggcacatctgttgcccctccgacgaagaaacccaaggctggacctaagccgaaaactgagtgctattattgcaaggggattggtcactggaagcgcaactgccccaagtatctggtcggtaagaaggcagccaacaacaaacaaggtatatttgatatacatgttattgatgtgtaccttactggttatcgtagtagtgcacgggtattcgatacagattctgttgctcacatttgcaactcgaaacaggaactacggaataaacgaagactggcgaaggatgaagtgacgatgcgcgtgggaaatggttccaaggttgatgcaatcgccgtcgacacagtctcacttcagttaccatcggggttagtgatgaatttaaataattttatttagagcctgcgttaagcatgaacattatatctggatcttttttattgcgagacggttactcatttaagatagagaataatggttgttctatttatatgagtaatatcttttatggtcatgcacccaatgtgaggggtttattcatattgaatctcgacagtgataaaactcatgtccataacattgaggccaaaagatgtcgagataataatgatagcgctactttcttgtggcactatcgcttaggccatattggtgtaaagcgcatgaagaaactccatgctgatggacttttggagtcacttgattttgaatcacttgatatgtgcgaaccatgcctcatgggcaagatgactaagactccgttctccagaacaatggagcgtgcaagtgacttgttggagatcatacatgctgatgtgtgcggaccgatgagcatagaggcgcgcggtggatatagttattttctcaccttcacagatgatttgagtaaatatggttatatttacttgatgaagcacaagtctaaaatgtttgaaaagttcaagcaatttcagagtgaagtagagaatcataggaacaagaagatcaagttcctacgatccgatcgaggaggagagtatctgagtttcgagtttggtgctcacttaagacaatgtggaattgtttcacagttgacaccgcctggaacaccacagcgtaatggtgtgtccgaacgttgtaatcgtactttattggatatggtacgttctatgatgtctcttaccgatttgccgttatcgttttagggctatgctttagagacagttgcattcactttaaatagggcaccatcaaaatccgttgagacgacaccatacgagctatggtatggcaagaagccaaagttgtcatttcttaaagtttgcggatgtgatgcttatgtcaaaaagcttcagccggaaaagctagaacccaaagcggaaaagtgcgtcttcataggatacccgaaagagacagttgggtataccttctatctcagatccaaaggcaaagtgtttgtcgctaagaacggagcttttcttgagaaatagtttctctcgaaagagttgagtgggaggaagatagaacttgatgaggttcaagaacctctacttcaaagtggcgcagggcagaaagaagtttctgtcaaagcgacaccagttgaagaggaagttgatgatgaagaacatgagactttggatcaagttgctatcgaacctcgtaggtcgacaagagtacgttcttctccagaatggtacggaaatcatgtcttatctatcttgttgttggaaaacaatgatcctacgatttatggagaagcaatggtgggctgatacgtctccaacgtatctataatttttgagtgttccatgctgttttagtatcaactttggatgttccctatgcatttatatgatgttttatatcttttttgggactaacttattaactcagtgcccagtgccagttcctgttttttccttgtttttgacctcttgcagataggaatatcaaacggagtccaaacggaataaacctttcgccacgatttttttccggaaatatgacgaacacgagacttgagaaccaaggcagcggggcacgtgagaggccacgagccaccaccacgcgggcccccctggccgcgccgtaggggctcatgggccccacgtggctccggtgccctacttctttcacctataaattctgataaatcgtgccacggaagaaaagagagccgcaattacttttccaccgccgcaagcctctgcttccgcgaagtcccatctggaggctgttccggtactctgccggagagggatccggagttggagggcttctacatcaacaccattgcccctccgatgatgtgtgagtagttcaccacagaccttcgggtccatagctagtagctagatggcttcttctctctcttggatcttcaatacaaagttctccatgatcttcatggagatctatccgatgtaattcttctttgcggtgtgtttgttgagatccgatgaattgtggattcatgatcagattatctatgaaatttattttgagtctttgctgatctcttatatgcatggtttcatatccttgtaattctcttcgagttatcggtttcgtttggccaacttgatctatgattcttgcaatgggagaagtgcttggttttgggttcataccgtgcggtgacctcacccagtgacagaaggggtagcaaggcacatatcgtgttgttgccatcaagggtaaaaagatggggttttcatcattggtttgagtttatccctctacatcatgtcatcttgcttaaggctttactccgttttcatgaacttaatacactagatgcatgctggatagcggtcaatgtgtggaataataagaagtagatgctgacagtatcggtctacttgtctcggacgtgatgcctatatgcatgatcattgcctagataacttcatgactttgcgcgattctatcaattgctcgacagtaatttgtttacccgccgtgatacttgcttttatgagagaagcctctagtaaatactatggtccccgggtctattttccatctacagttttcagatctttattactttctctgtcacatctcacttttgcaaacaatcatgaagggattgacaacccctttgtcgcattgggtgcaagttgatgtttcttgtgcaggtaacttggcgattcatcttagagctcatactggattgataccttggttctcaaactgagggaaatacttgttgttgctgtgctacatcaccctttcctcttcaagggcaaaaccaatgcaatctcgagtcaaattgccaatttttggtgacgtgactgggaagtagtaggaagaatttctggcgccgttgccgggtagttgcaagtggagcacatctaccaagtacctctcaaactcatctcttgcatttactttgtttgccagttccctctcgttttcctctcccccacttcaccatttgcctttttctctcgcccgtcttttttgcttgctttcctttttgctcgtgtgtttgtgtgcttgctaagtcaccatgtctgaaaacactaagctgtgtgacttctcgaatactaataataatgattttattagtactcctattgctcccgccactagtgcggattcatatgaaatgaatgccgctttgttgaatcttgttatgaaagagcaattttctggccttcctagtgaagatgccgcatcccatcttaataccttcattgagctttgtgatatgcaaaagaagaaagatgtggataatgatatgattaaaatgaagttatttccgttctcactacgagatagagcaaaaacttggttttcatctttacccaaaatagtattgattcttggaacaagtgtaaagatgcttttatttccaagtactttcctccagctaagattatttctctccgtaatgctatcatgaattttaagcaattagatcatgaacacgttgcacaatcttttatgctggcttgaattttgcttctagaaacatcttggattccgcctccggtggaactttcatggaaattactttaggagaagctaccaaactcctagataatatcatgacaaactattctcaatggcacaccgaaagggcgcctactagttaaaaagtgcatgcggtagaagaaattaactccttgagtgccaagatggacgagttaatgaaattgtttgctagtaagagtgctcctttagatcctaatgatatgcctctatcttctttgattgagaatagcaatgagagtttggatgttaagtttgttggtaggaataattttggcggtaacaatgcttatagaggaaattttcctaggccttttcctagtaatccctctaacaattatagcaattcctacaacaactctcatggaaattataataaattcccctctgatcttgagagcaatataaaggaatttattagtttgcaaaagtctttcaatgcttccttagaggaaaaactgcttaagattgatgatttggctaggaccgtcgatagaatgtctcttgatattgattctttgaagttgcgatgtgttcctcccaaaattaatatggatgaaactttcaaagctatgcgtgtttctattgttgagaatgaagaaagaaccacccaaattcgtgctaggcatgaatggctcaaaaaggcgcgttctcatgatgaaaatcacgaagatcttaagatgcttggcgtgactcctattgaatctttgttttcgcgtgtcaattcttttgatgatggggctggatgtgaatccactttggttgaaaaacgccccaacgattcggagttcacttatcttgatgctaaaaacatcaaaagtggggtagaggattgcaaaattttgagtggtgatgaaatcactacttgcgatttcaaggaatttaattatgatagttgctctttgattgaatgtatttccttgatgcaatccatattaaactctccacatgcttatagacaaaacaaggcttttaccaagcatatcgtagataccatgatgaaatctcttgaggagaaacttgagttagaggtatctatccctagaaaactccatgatgagtgggagcccattataaaaatcaagatcaaaaattatgagtgccatgctttgtgtgatttgggtgctagtgtttccacaatcccaaagtctttatgtgatgttcttggttttaatgagattgttaaatgctctctcaatttgcatcttgcggattctactattaagaaacccatggggaggatcaatgatgttcttattattgcaaataggaactatgtacccgtggatttcattgtgcttgatattgattgcaatccttcatgccctattattcttggtagacctttcctaaggactattggtgccatcatcgatatgaaggaagggaatattagatttcaatttcctttaaaaagggcatggagcattttcctagaaagaaaataagattgccctacgaatccagtatgagggccacttatggtttgggcaccaaagatggcaatacatgattctttttgccttgtgcctagctaagggcgttaaacaatagcgcttgttgggaggcaacccaatttatctttgccttttgctttctgttttgtattttccacactttcataattctgttattatggtgttttttgtgttttaattagcgtttgtgccaagtgaaacctttatgattagtcttggtgatgattgtttgatcacgctggaaaagacagaaactttttgcaaacgaaaagaattttcatttttattctggaagagcttttgagttgattttttttgctgctgattgctatgcaatttctccagacgttcataatttttcaaattttgtgaggtaacagaagtatacggagtatacagattgctacagactgttctgtttttgacagattctgttttcattgtgttgatcgtttgttttgatgaaactatggatagtatcggggggtacgacccatggaaaagttagaatacagtagtgtaacaccaatatgaatggaattcaagttcacttcagtacctttcaagttagtagtttgtttccttgtgctaatgatatcatgagtttctgtttaagttttgtgttgtgaagttttcaagttttgggtgatcttcctatggacaatggaacaaggagtggtaagagcctaagcttggggattcccaaggcatcccaagccaaattcaaggacaccaaaaagcctaagcttggggatgccccgggaaggcatcccctcttttgtcttcaatccatcggtatgttacttggagctatatttttattcaccacatgatatgtgttttgcttggagcgtcgtgtgttatattagttttttgcttttagttgtgccacaattatccttgcttcacacctctttttgagagagacacgcactcatcgtgtatttgttagaatactctttgagctccacttatatcttttgagctagacacttttgctcccatgagcttcacttatatcttttgagctagacacttttggtcccatgagcttcacttatatcttttgagctagacacttttgctcccacgagcttcacttatatcttttgagctagacactttcgctcccatgagcttcacttatatcttttgagctagttgatttgttgctctagtgcttcacttaaatcttgttagagcacggcggtggcatattttgtagaaatagaaactctcgatcttcacttatatctttttgagagtgctctcttaaagaaacttggtaattggcgtgtgctatgaagttagtcctatacgtgataggcatccaaagaggatacaataaaaaaacctccatatttaagtgcattgataagtaggagaagtttgattcctcatgcttagttttgagatgtgtttatgataatattagagttatgactagtagggtgttgtgaatctagacatacttgtgttgaagttagtgattcccgtagcatgcacgtatggtgaaccgctatgtgatgaagtttgagcatgattagtttattgattgtcatcctttgtgtagcggtcgggatcgcgcgatggtttatacctaccaacccttcccctaggagtatgcgttgaatgctttgtttcaattactaataaaacttttgcaacaagtatatgagttcttcatgactaatgtgagtccatggtttagatgcaatttaccttccaccactactatcttctctagtaccgcgcaactctcgccggtgcataaacccaccatatagccttcctcaaaacagccaccatacctacctatcatggcattttcatagccattccgagatatattgccatgcaactaccaccgttccgtctcatgacatgtgccaccacttccacattgccattgcaagatcgtaagatagctagcatgatgtttctatggcttgtccattttttgatgtcattgctatgctagatcattgtctcgatacactaccgaagtcatttcatatagagtcatcattgctctaagttttgagttgtaagtgtgatgatcatcattaatagagcattgtcccatgtgaggaaataaaagaggccagcgaagcccattacaaaaaaagaggccaaagatgcccaccaaaaaaaaagaggccaaagagcccaccaaaaaaatgagagaaaagagagaagggacaattgctactatccttttccacacttgtgcttcaaatagcaccatgatcttcatgatagggagtctcctatgttgtcacttccatttactagtggtaaattataacttggcttgtatattccaatgatgggcttcctcaaaattgccctaggtcttcgtgagcaagcaagttgggtgcacacccactagtttcttttgtgagctttcatacacttataagctcaagtgcatccgttacatggcaatccctactcattcacattgatatctattgatgagcatgcctagtcaatgtgaccatcttcttcatttttgcctcacaacctccaccatattccactccacctatagtgctataaccatggctcacgctcatgtattgcgtgagagttgaaaaagtttgagaaagtaaaggtgtgaaaacaattacttggccaaaaccgaggttgtgcatgatttaaattcgttgtgcaatgatgatagagcatagccagactatatgattttgtagggataactttcttttggccttgttatttcgaaagttcatgattagtttgctagcatgcttgaagtattattgttttcatgtcaacattgaactatgatttggaatcttatggatctcaacattcatgccacaatgaaggagttacatgaaaaaaatatgccaggtagcattcctcctcaaaaattcggtctttatcacttccccactcgaggacgagcaggagttaagcttggggatgcttgatacgtctccaacgtatctataatttttgaatgttccatgctgttttagtatcaactttggatgttccctatgcatttatatgatgttttatatcttttttgggaccaacttaactcagtgcctagtgccagttcctgttttttccttgtttttgacctcttgcagataggaatatcaaacagagtccaaacggaataaaacttttgccacgatttttttccgaaaatatgacgaacacgagacttgagaaccaaggcagcggggcacgtgagaggccacgagccaccaccgtgcgggcccccctggccgcgtcgtaggggctcgtgggccccatgtggctccggtgccctacttctttcgcctataaatttagataaatcatgccacggaagaaaagagagctgcaattacttttccgctgccgcaagcctctgcttccgcgagatcccatctggaggccattccagtactctgccggagagggatccggagttggagggcttctacatcaacaccattgcccctccgatgatgcgtgagtagttcaccacagaccttcgggtccatagctagtagctagatggcttcttctctctcttggatcttcaatacaaagttctccatgatcttcatggagatctatctgatgtaattcttctttgcggtgtgtttgtcgagatccgatgaattgtggattcatgatcagattatctatgatatttatttgagtctttgctgatctcttatatgcatgatttcatatccttgtaattctcttcgagttatcggtttcgtttggccaacttgatctatgattcttgcaatgggagaagtgcttggttttgggttcatactgtgcggtgacctcacccagtgacagaaggggtagcgaggcacgtatcatgttgttgccatcaagtgtaaaaagatggggttttcatcattggtttgagtttatccctctacatcatgtcatcttgcttaaggctttactccattttcatgaacttaatacactagatgcatgctggatagcggtcgatgtgtggagtaataagaagtagatgctgacagtatcggtctacttgtctcggacgtgatgcctatatgcatgatcattgcctagataacttcaagactttgcgcgattctatcaattgctcgacagtaatttgtttacccgtcgtgatacttgcttttatgggagaagcctctagtgaacactatggcccccgggtctattttccatctacagttttcggatctttattactttctctgtcagatctcacttttgcaaacaatcgtgaagggattgacaacccctttgtcgcattgggtgcaagttgttgtttcttgtgcaggtaacttggcgcttcatcttggaactcctactggattgataccttggttctcaaactgagggaaatacttgttgttgctgtgctacatcaccctttcctcttcaagggcaaaaccaacgcaatctcgagtcaaattgccaatttctggtgacgtgactgggaagtagcatgtgcccggattcctacaaatggttagaggccatgaactctgagataggatctatgtatgaaaacaaagtatggactttggaagtattacctgaaggccaaaaggctattcagaacaaatggatctttaagaagaagatggacgcagacggtaatgtgaccgtccataaagctctacttgtggcaaaggggttttaacaagttcaaggagttgactacgatgagactttctcacccgtagcgatgcttaagcacgtccaaatcttgttagcaattgttgcatatttcgattatgagatatggcagatggatgtcaaaacggcgttccttaacgagtttcttaaggaagagttgtatatgattcaacccgaaggtattgtcgatccaaagaatgctgacaaagtgtgcaaactccagcgatccatttatggactggtgcaagcatcttggagatggaatatgcgctttgatgaggtgatcaaggcgttcgggtttatacaagttgtaggagaagcttgtatttacaagaaagtaagtgggaactctgtggcgtttctaatattatatgtggatgacatatttctgattggaaacaatatagaacttttgaatagcgtaaaggattacttgaacatgaccttttctatgaaggatctaggagaagctgcttacatattgggcattaagatctatagggatagatcgaagcgcatgataggactttcagaaagcacataccttgataagatgttgaagaagttcaatatggaacagtccaagaaggggttcttgcctatattgcagggcataaagttgagtaagactcaatgcccagttaccgcagaagatagaaaaacgatgagtgtcgtcccctatgcatcagccataggatctatcatgtatgcaatgctgtgcacacgaccggatgtcagccttgccataagtatggcaggcatgtttcaaagtaatccaggagtggatcactggacagcggtcaagaatattctgaagtacctgaaaaggactaaagaaatgtttctcgtttatggaggtgacgaagagctcatcgtaaagggttacgtcgatgcaagctttgacacagattcggatgactctaagtcatagaccggatacatatatattcttaatgggggtgcggtaagatggtgcagttccaagcaaagcgtcgtagctgattctacatgcgaagcggagtacatagcagcctcggaggcggctaaggagggtgtctggatgaagtagttcatgacagatcttggagttgtgccaggcacactggatccaataactctgttctgtgacgacactggtgccattgctatagccaaggacccaaggtttcacaagaggaccagacacatcaaatgacgcttcaacgtcatctacgactatgtcgaaggagaggacatagatatttgcaaagtgcacacagatctgaacattgcagatccactgactaaacctcttccacgagctaaacatgaaagataccagaactgtatgggtgttaaatttgttaaattgtaatatcacatagagatgtgatgctagattattgactcaagtgcaagtgggagactattggaaatatgccctagaggcaatgataaaacagttattattatatttcctgttacaagataatcatttattatccatgctataattgtattgattggaaacacaaatgcatgtgtggatgtatagacaaaacaatgtccctagtgagactctagttgactagctcattgatcaaagatggttaaggtttcctagccatggacaagtgttgtcacttgataacaggatcacatcattaggagaatgatgtgatggacaagacctaaactataaacgtagcatatgatcgtgtcagtttattgctactgttttctgcatgtcaatgtatctgttcctatgaccatgagatcatgcaactcctggacaccgaaggaataccttgtgtgtatcaaacgtcacaacgttactgggtgactataaaggttctctacaggtatgtccgaaggtgtctattgggttggtatgaatcaagactgggatttgtcactccgtgtgacggagaggtatctcggggcccactcggtaatacaacatcacaaacaagccttgcaagcaatgtgactaaagagttagccacgggatcttgtattacggaacaagtaaatagacttgccggtaacgagattggaataaggtattggataccgacgatcgaatcatgggcaactaacataccgaaggacaaagggaatggtatacgggattatgtgagtccttgacatagaggttcaaccggtaagattatcgtagaatatgtaggatccaatatgtacatctaggtcccgctattggatattgaccgagaggtgtctcgggtcatgcctacatagttctcgaacccgcaaggtctgcacacttaaggttcgatgacgtttcaatatagttgagttataggtgctggtaaccgaagttttgttcggagtcccggatgagatcccggacgtcacgaggagttccggaatggtttggaaacgaagattgatatataggattgtttcatttggcctccggaaagatttcgggcattaccggcagtgtaccgggagtgacgaatgggttccggagttttaccgggaggggcccacccacccgggagtgagcccaatgacccaagggtggcacaccagcccttagtgggctggtgaggccagcccaagtgggctatttcggctaaggaagaaaaaccaaagagaaagaaaaaaagagaggaggtgggacaagagggaaggactcctccctccaaaccgaattggaggaggactcctcccctctcccttcggctgaacccttgggactctcttgagcctcaaggcaaagcccctcccctcctcctatatatactagaggttttgggagtttgagacccaacttttgccacgtgcatcccgaaacatctacttcatagttttctctctagatcggatttctgcggagcttaggcgaagccctgcaggaataagatcaccaccaccactggagcaccgttacgctgccggtgaactcatcttcgtccccgtctcccttcctggatcaagaaggtggagatcgtcatcgagctatacgtgtgctgaacgcggaggtgtcgtccgttcagtacttgatcgggacggatcgcgagacggtttgtgggacggatcatggggctgttcatgggatggcgatttgaatcgcgaagacgtaccactacatcatccgcgtttattaatgcttctctcttagcgatctacaagggtatgtggatccgatctccctctcgtagatgatcatcaccatgataggtcttcgtgtgcgtaggaaaatttttgtttcccatgcaacgtttcccaacactccggtgctggagatgatgctgctttgcacttgaacaattttgttgagctttgtgatatgcaaaagtacaaagaagtagatggtgatattgttaaacttaagctttttccattctccttgagaggaggagccaaagtgtggcttcaatcttttcctaggaatagcatagattcttgggataagtgcaaagatgcttttattgggaagtattacccgcctgcttagattatccagtttagaagtaatattatgaattttaggcaactggataattcacacgttgcccaatcttgggaacgtatgaaatctcttgttaagaattgccctactcatggtttgactacttggatggttatccaaactttctatgcaggattgaactttacctcgaggaatctgttagactcggctgcgggaggaacctttatgtaaactacacttagtgcagccacaaaactataaaatgagatgatgacaaattattctcaatggcacaccgagagagctcgaacaggtaggaaggtaaactctgttgaggagatttcctcccttaatgataaggttgacatgatcatgactttacttaccaagcaagctcctattgatcctagtgatgttcctttgaattctttggttgctcaagaaagagagcaagttgatgtcaattttatctctaggaacaactttaacaataatgcttataggagtaattttggtagcgatcctagaccgttcccatccaacaactatgggaacaacaacacctatagttacactcctaatgataaaagaatgcctagttatcaaaaacttttagagatagagaaggctacagagaattatatgcacacccaatatgaacaaaacaatgccttttctagacaattagatcagcattcttctattttgcaaaacattggaaggcagcttgagagcctgaatagtgagatttccaatctccagactagactcaccaccacggaaacccaagtttccaatatgtctcacacccaggccactttgataaatcagatggcggccaaacccgaagtggttgtacctcaagaagaggaagataggattaggaaccttccaacacacactacccttgctattatacatgttgttgaggatatcaaaacttttagcacccatcacatccctagtcccaatggacctattaatggtgatgctaatacctcaaccttaggacaagtaggtccttcaaacttagagactactcaaagagtgagcttagatgacatcactaccactttaattaatggtagtaatcctgattttgacaattgtagtctttctgaagtcatcacctttttgcaaagaatggctaaggacccccacactagtacacttaatattgccttcactgagcatattaccaatgctcttatcaaagctagggaggagaaactcaagatagagacttatattcctagaaaactagaagatggttgggatcctatggtcaaaattaaaatgaataatttctattgctttgctttgtgtgatgttggagctagtgcctcagttatgcccaaaagaatgtatgataagtttaacttcaaaccttatgatccatgttcttttggtgttcgccttgttgattcttccataaagaaacctttagggagaattgatgatattcttattattgtcaatgataattacgttcccgttgattttcttattatggatattgagtgtgatccctcatgtccaattattttcggacgtccttttctccgcaccgttggtgctatcattgacatgaaagagggtaccattagattccaatttccccttaaaagggaatggaacacttccctagaaataagattaagttaccttatgagtccgttacacgggcaagttattcgtttggagtttatataacttgatcttttgcttcgtgcctagctcaaaggcataaaagaaagcgcttgttgggaggcagcccaatctgtttttactttcagttttagtggtcttgaagtttgttactactgtagcaacatcattgtatctttattttttagccttgtaccaagttttagcctccgattgcaagaaagtgcaaaaattgtgacatgctgtccaggaacagattatgtctacctgataaaaacatttgcctaaaatcaccagatcatctttttgatctgaagttttttgacagtatgctctatataattgtctttcaggagtcagttctaagttttttgatttgagttgcagaactgccccgaaaaaaattatttactactgctggtctgtttttcccagattctgccctgctttgcgttttcattgttttgcaaagtttaagcctgctttttctttgcaaagatattttggcaatcttgagaaacagaagctcttcctgaaaatatttatttccaatagagagttaattattttattaagggaactaaccactctaatcagcttatgatgagttgcgtatgaaggaagttttcaagtatgcgatggaagatgatgaaagaagatccaggagtgtcaagtgctcaagcttggggatgcccccatgcacccccaagaaatattcaaggagactcaagcgtctaagcttggggatgcccccgtgcatccccttctctatctacaatcatcagttcgtcattctccatgctatatttttatcacttcatatgttatgtactatgcttggagcgtcttgctctttactttttagtttgttttagttttgcttgctattcataacaatttggatcctagccttatttgcttgggagataagcgcgctccactcaaacatagaacataacatgagttttcatgtttatcctttttgtgttctatatctttccatagctactgacatgcttagctcttagttttcatgcttatcttttaagagctatttatttatttaggttgattttgaaactctcttgaactatcttgtttagaaagttggcttgttgcattgagttgtgtgtcttgtatgagtaggtaattgaggttgctatttaagtctagtagtaacttgcaatagttttgaggtattgatttgagtaatgtttggactattggtgccaagaccttgatcctattagtgataggtgtcgtattttgggaaatccgtgtgtttttcaaaaactaaaaattagttgagaactctagctattaaatggatcactaacctctggaggggttggaatatatagagtaccctcacgttaccatgggtcgaggatgcgcaaggataaccaaacactcctccttggggtacttgtctctttgtgaatttcctgactagatagagagttaccgataataagtgcatgagttctttggactaatgtgagtattcgattattggcacttccaccatccatattttgctagcctcttcggtaccgttcattaacctttctcatcttgagagttggtgcaaacttcgtcggtgcatccaaacccatgacatgatacgctctatcatacataagcctcattatatatttcctcaaaacagccaccatacctacctattaaggcatttccatagcctttccgagatacattgccatgcaacatccaccatctcatgacttgatcttcatgtcatacatgcttttgcttggtcgaggagccgcatgttagttgggctttgcccttattattattgctacatgacgcgctagtatcattgcatatcctgctacactggcagaggcaaacatttgcatacatcatgatagttttcattgttagttttcattgttatttatgttgagtacttcttataaagtgtgaagatttttatttctattcttgtaaaaaatagagtgttgcccttaagtgaggaaaagatcccaaagaggacaaaatgaaaagaccccaaagaggacaaatgagagataaatagaaagagccaaagaggccacacaaaaataaaaataaagagaaaagaaaaagaaaaattaataaataaaaaaagagaagggggcaacactactattccttttgaaagatccacactcgtactccattgatatatttgtgctccatagagattatcattcatgcataactatgtggggacctttacactataggacttggcttgtatattccaatgatgagcctcctcaaatgagctctaggtcttcatgagcaagcaagttggatgtacccccactagttccattggagagcttaccatagctcatatgtgcatccattgcatgacaatccctactcctcacatcatatctatcatttggttttctctcacctatgatcgtcctcattgatgtgagccttttacacctttttgtcttccttccccatcattctctatgccatcctaagtgccaatatatcttgcttacgctcatccattgcatgagtgctcaaagtcgaaagggaaaggatcattttgacttgtgcctgactagtggtctggggatgagtcaaaataagattccaaaggagaccaagtgtgaaattttagtagattgagttctcaattaaaaaactatttttgtactctcaacccatctcccacttcttgtgcgcaaacaccatttggagacattcgagtcacggacagcgagagctcatgaacctttatgttcctactctgctaatttcaatactagatatagactcttgcttgttattgtcttgacttgaattgcatatcttacttgctttactttgtagttcttatatgtgtgatagcatgtccccacagaaattatttctgttatcatttacctactcgaggacgagcgggaattaagcttggggatgttgatacatccctaacgtatctataatttctgcttgttccatgatcttttgggtgacattgttatatgttttgcaacacttttatatcattttacacatatttggactaacctactaactcagtgcacccagtgccagtttctgtctgctaatgtcttttttgcaggggcttttacccaattttttggagcccgaaaaattccaagaaaaatatataaaaatcagcgtgacgggaactccaggatcaacgaaggggggacagagggggccagggcctgcccaggcggcctggtggcacggccagctccctgtgcggcctggcccctggtcgcgccaccaggccgcctagatggggcccacaccctctggtgctctcctttagcctatatttacccctcgacgaggaaaaccctccagaggatccagaatcacgaattcctccaccgttccaccgccgcagcgctttcgagatcgggagcgtcaggagacctcttcccggcaccctgtcggagggaggattgatctccgggagcttctccaccaccatggacgcttcccggacatgacgtgagtagtcctccttggaccatgagtccatgaccagtagctatgtgatgtcttctctccaatcttatgcttcaatggttagtccttgtgagctaccctacatggtcaaggcatatatgtaatcctcttgctattgctatgttgagtttgatgggatccgatggattatgagattatgttcagatcgttatgagttatatatttggttcttcttttatattatgttcttagtgattcatgcatgttctccgttaccttttattgcattggccgagtagtagattgtaactccaagagggagcgttatgcatgattgtgggttcatgcccctcgatgtctagcttgagtgacagaaacatgagtctagggaatgtgatgttgccaccagggagaaaacaacggtgcttgtaaccacggttgcaaggattgttaaccttacgtatagttcgttaatgcagttgtctgttgctttgagtttacactttgggtgggactcgcaacttaataccagcgagatgttctggatagatatctcaaggtggatgattagtaagtagatgctgatgaataaacggtctacttgtcttggcgtactgcccattacttttgagcctcaaaacaatcaaggagcatggttagcattgcggtgcgtttataattatgtcaattgcctatctgtaatttgtttacctcgcatagttgtttatcgtcttttaggagagagacatcactagtgaacatcatgagactccggtccatatttccaccactgtttacacctccattatttactgcttaattactttcccgttgcaatcaccattactattcccgcttgtgttttgatcctttgcaaactacaaggatggagagattgacaacctctatgtactcgttgggagcaaagttatttgatgtgtgtgcaggtacatgtcctctataagcgccagagcagcggacacctacttgtttaacctcggagtcctcctggttcgataaaccttacagtctccgtgtaagggaaacttgctgctgactacatctcaaccttgcacttggggtaaccaacgagggggcgagaagtatgtacattctctcgtcatcaccaaacacgaagaaagagaggacacttctctctattagctagctaacataatatgaaaccactaaattaaccctccaaaaccccccaacccccacccccccattaaaaaaacaaaaacctcagctccagccagttgctgacgcgtggatgtcgttcggtcccagttggtgtgaccaaccgggactaaaggccctcctgcctgtgctccccgcagcggccacgtggagacccttctgtctcggttggtaagcaaaccgggactaatggttttgggctttagtcccgaccctttagtcccggtttcggaactggggttaatgagcctctaggaccgggacaaatgggcctttttctactagtgtgcacggataagcacatggtggacccacacgcagcgacatagggcgaccgaagtccaagtagcaaccaggaccgacagaggcacatctttatccatgggacaaaatgtagcacctcatgccacctcatttcactccgcagcacccctacccaaagaggccgatgagtgggcccaatagtgctgaagtggaagagcccccagctgggtgtgcggccggagtgtgatagtagacgcacgctaatccacccatctgcccgcagaaaccgctcccaatcccaggacgcccacgactggcacgattaaatctttttcacccacgcatagcgcacacacacgtggcatacacacctttagtccggtctcgcgagaaacaaaggcccacccgtcatcctcatgagtaagaaaaaatcaaaaaagtcgagccacccacgttggatgacctgcaccccacgatcatccctgcctgcaatccatggtcgtcgttgtgtttccatttgaacacaagcacgcacgcacgctgtgactacaaactgtccccacgcaaaaggctggcccaatcgtcatccgctttaacccaaataggcaatatgttcaaaaaaacaagcgaacaaatatttaacaacgaggtttaaagtacaaattaagtacacgtcagagtagaacgtgcggagcagattcatacaaaacgtaatggagtcgtgggtagcacaacgtcttttatatgtacaatgtacaattgctatagccgagtgatgcactcgaccataccgtgtgcggaggagaggaccagatggcaccggctatgcgggcggcagcacatggtaagtcgtgtccaccaacaagtccaagaatgatataaagttgctataaaatgatcataaaacacccaagaataataatataacaacatgtaacaacaaaaattatagatacgttggagacgtatcaacagctaccgagactgtcttacgcgcaccaccagagttgacctgcgcgacggccatagatggaccagtcaccccaaggccagagctcccacaacagcgatccgccatccgagcaccttttgtgacaatttccgcaaacgagggagaacgagggccaagaccttcacgcaccagatcgatagatttagtaggtggatcgaaggggcgacgaatcgtaagatggcaatcaccagcagtgaatgagccagatttcacaagatccctacggatccagaaaagcaacttagaagagtgcccaacacccttagttttggatggaggaagcggacggtagcgacaggggggaggagggaatgagccagagctggccgaagtgttcctctacttctagggcttccacgagagaacgcacattcctacagttcgctttcttaccaaggaaatgggcccaaaaagtggcccccctttgtaagttggaaagaggtggagaaatcacacccctccccaacgtgacatcaccaccgacgaccatcgtcgtcggcaaacgatccccaccaaccaagccctccaacgccccagccaaaggatgaattggaaccacattcatagaaacgacatccatctcggtagaattgtcaattcgctgagaggaacccctcattttttcaccaccaatttttttagcaaaatccccagaatctctaccacacctagcacagaacgcaagcaatctagacttgaaagaggggggaagacgaatacgatccatacctccatctctaggccaaggagggggctcgggagcctgatgacgttgacaaaatgggggcgagatcagacattgcgactgggggagcacccccggcggcagcacttccggcgggatcctgccaagggtgtccacccgtggcattcggatgttgaggcgtgagggatttgccgtccggtagaacgcccaccgcatcgcctgcaccggatcggacgactcggcctcctgaatcgccacatccacgcacccgtcatccaccatgaatcggcaggactcgacgaatgtcgtgtatcgaattattcggatgtggatctccgagcactcgttccggtcggggaaccaatccaataccaccctacgcatctccctacgcgcctccggtgaattgttgtcaatcgagggcagtgcagccaccacatgtagtggcctggccacccgcgtcgctggaggcagccgccggattcgaatccgacgacggcgcgctcccaccatgtgagaaggtcgtcggcgagtctaggggagagagcgagcgacacggtgggtgggtgggatcgacgatgggattagatatattagtcttcgccagcttgcctccgagaaagaggaagagggagtggccattcgtttcgttcaccataagtgaggtgaggtgtcctggcggtagcatagggtgttttatatgggacgcagatttttgggacatggtgacacgcgatgccgaaatctcagccatccgcttgtgctttgtgattacgaattaatatagctcattttctaatacgtgcaggtaatcaataatacatggaatacgcagcagtgagtggtccatgacacattgaattcgtatgcactttttgtctggtactagttgagttttgacacactgtgagatgtgttggatttaaatctctgctacgtacttgatggcctgcatgtcatttaaaacaatctttatgcagccaatactacataatttgagtgcgggacgtgtagtttagatatgcttcatgcaggtgggtgtataaagaacactgttgaatcttatcaccagattggctggatagagggaaaatttattaatacgagattacttgaagacttgaagtgtgagccacgatttggccatgtcgtaaatatatcccatgagtggagctggagaatcgatgtggaacattgatgaacactgaacactaggacatgaacacaaatgctggtgttgttggagcagatggacatgaagtattgtttgcacgacggagagaatcgagagaaagggtgtggaatatggactgctcttagacagtcattgagtgacacatgaccatcaaagctaagagagaaagagagagagatggactgctgcagctacaactccacatctccatttgttctgagaaaaaaaactctaaatctccatgtatgggttctagctagccatgcaatgaacgaagagcaagaactagagaagcaagatgggtgagagataagctgcagaatgaacaatgaatggggagaaaatgcatgcaatggtgcaggtcggcgtggatgtacgctagctctgaacatgaacagtccatgaactagagaaggaggatgagtgagagaggagctgctgaatgacgaaaggatggggaaaatgcaggcggtggtgcaggttgcccattaactcttgtgtaaataatactactgggatcagtgcacttattatgtggtggggcactcacttattattatttttttgcctgagcactcatttattattgactctgtaatacctagacaaaagacatttataccacgctgaaaaatcgctatacatggctcattatacacaaacagcacgaatcacgtggcaacggacggggatgatatcagatctggccaaacgggcccagtaaatgggccggctcgacagcccgcgtgcctggcatgacacgggcccggcccggcacgggctaatcgtgctcgggcccggcacgaagcacgcctcgggccgtgcctgagcctggaggctgggcacgtgggccggcacggcatggcccgtttatttttttatatatatttttcttatcgtatacatgatatggtgattgattctatatatatatatatatatatatatatatgcaagaatatgacccaatagacccaaaataagcccatatgcctaaaaaaatcaggccgagcgtgctaatcgtgcctcgggccggcccgtttacccagccgtgccgtgcttgggcatggctgccaggcacacgggccggcacggcacggcccgtacattaattgggcccaggcgggccgtgccgtgcctgacatgtttacggcgggccgggccgtgccgtgccgggccgggccggcccgtttggccaggtatggatgatatcatcctcgcgtggcaccatgtccactcgtgatttattggttttatatgtacaattgctataattgagtgatgcactgggccataccgtgtgcggaggagagggccacatggcagcggcttatggggggcggcagcacatggtcggtcgtgtccaccccaccaacaagtcctccgccctctgttctcagcgtctatttctaccgcgtttggagagtgagagattcagtagagactagagacagagagaggtagatctcgcggcgtcgggctcctcccgcgtctatcccgtcctgccgaccaccggcggcctgcacaccggtgagtccgtgcagcggtctgaagagacgcgtgctcgcaggggggaggggcgaggcgccggatctcgcgggaaagtgcgtcaacaacgtgtggtatatttcgtttcttcctgacctggatccgactggtttactttttgagtttaccgacgagtagatctgctgtgtgttcatctagtgtcaccaactgttggtggtcagccgtaggcttccgtaagcgttacttctttcttctcctgttctagatccgactgagctagatttgttcggctaagttcacggtgatgtggatctgaaatgcaaactgtcggtcatccaccctaggtttccttccgttctactcccaagtgaatcacgcgtctgcttcaagatccagttaaatcaggagtggatctagtttcttcaagtaaaaaatcacgagtgccgagtgttaactgttggtggtcagccgtaggtttccttcagcgttagttctagatccgactgagctagatttgttcggctaagatcagggtgatgtggatctgactgaaaagcaaactgtcggtcatccatcgtgggtttccttctgttctactccaagtgaatcatgcgtcttcttcgagattcagttaaatcatgacgagtggatctagtttcttcaagtaaatcacgagtgtcaatcatgttttccggcccagccggccggtgcgtgcatcttaattcttcagtgcacattgctgcccatacatgatagatttacagtgctaatttggtcatacaagctactcaaggtcatccaccaaaagttttgtattccgtgttccacttgaggcaatcaatcttagctaggtggatgtgtattagatgcatcttgagttcatccaccaaaagtttcgtattccgtgttccacttgaggcaatcaatcttagctaggtggatgtgtattagatgcatcttgagttcatccaccaaaagcttcctatgcagtgtttagtctatgacaactgtatactagtaatagtagtgtgggacttgaaaagatgctgctgtgaaagaaatgaaaggatattgttattcacctgttaccacctgtaccatccactgttttctttctggtgcagatcgttggtcattcactgctctttcttgtggggacactttgagtgtttgatataagctgtttttcttttaggttttgctcgtcttttgcctagatagataactagctcatatcttgctgatttggttgccgctaaccattgcaaaaactttcatttgaataggtaccttgtatgggatgaagtgaaggctattttgttaatcaatcatcgtattatgtgcacaataagcttttgctatgcattcaccgtcgatgcccactggctggatcatacttctgtttataagctcattgaagtaactctctcctagctcaaatcggccaatttctcgtttgcattatatataaaaccttcagctatccatctccatatcagttcgtctctcttaattttgtaatcttttggaaatatgcttaaatatcctcaaacatatacgagccacacatgctgcaccaatactatgcaaagtagcatagagtgagtaaaataggctcttgacttttagattatacaagagcgattatctacaagtcaaccttttttttactaacaactagtagctttgatataccttctcatcatgtatatttttagaagattaagcaaactcctttgatatgtaaatggatagtttgaggttttatttataatgatgaacaagggattagcaagtttgagctcggtgatagaattactcaatgagatcgcaaatagaagcatggttcagccaattgacatcaatgttgataaaggcatggaaaaatcttatcgtatacatgatatggtgattgattccatatgtttttgccaagtgaagaaaaaccatttgcacggcactcagtcaaaggcaagattggaagattaaacattctgaagagcatgacaggtttgaagattaaacggtttaagttctcctctttttggatttaattagggtatatgcttccattcctgtcaattgagactgcctgataacactgcatttcccttggtgttttgatttgtccttctgcaacagac

SEQ ID NO: 2 - DNA, 2760 bp, synthetic construct
  source 1..2760: mol_type = other DNA; note = cDNA Ryd4Hb - HORVU.MOREX.r2.3HG0265710
atggagattgccatgggggctatcggccctctcctccccaagctcggcgagctgctcatgggtgagctcaccatggagaagaaagtgagaaagggcatcgagtctctcgtgacagagctgaaattgatgcatgccgtcctcagcaaggtggccaaagtgccggcggaccagcttgacgagggggtcaagatctgggcaggaaaagtcaaggagctgtcctaccaaatggaggacatcgttgatgccttcatggtgcgcgtggaggatggcggcgagcctgccaacccaaagaacagagttaagaagatagtcaagaaggtcaaaaagttattcaagaatggcaaggatcttcatcggatctctgatgctctggaagaagtggttgttcaagctaagcagttggccgagctgcgtcagaggtatgagcaagagacgcgggacactagttctaatactagtgttgaccctcgcatggtggccttgtatacagatgtgacagagcttgttggcattgaagaaacacgagaccaattgatcaacatgttgattgggggtgatgattggtcgaagcatccattgaagacggtctctattgttggatttggcgggttaggcaagacaactcttgccagggcagcgtatgacaagatcaaattgaattttgattgtggtgcttttgtgtcagtatcgcaaaatcctaacatcaagaaaatcttgaagagtattctctttgaacttgacaaggtgaagtatacaggcatttataatgtagaaagggaagaaactcatctcattgatgagcttattgaattccttcatgaaaagaggtacctcatcataattgatgacatatgggataaagaagtgtggaaattaatcaagtgtgctttctccaagaagagtcccggaagccgactaatcacaacaactcgtgtcattagtgtctcagaagcatgttgcccatctagggatgatatttacaaaatgaaacctctttccaatgatgtatcaagaacgctcttctgtaaacgagttttttctgatgacaaagtgtgtccccaagaattggtgcaagtaaccgaagatattttgaagaaatgtgggggcataccgttagctattattactatagcaagtcttttggctagtaaccatcaaataaaaacaaaagatcaatggtatgctttgctcaattccattggtcgtggactcacagaagatcgaagcgtggaagagatgaagaagatattattattcagctattatgatctaccttcttatctgaaaccatgcttattatacttaagcatcttcccagaagaccatgagattaggagagatagactgatatggagatggatatcagaaggctttgtttatagtgaaaagaaagatattagcttatatgagctcggtgacagctacttcaatgagctagtaaatagaaatatgatccagcccatagacataggttatgatgaaaaggtaaatgcttgtcgtgtacatgacatggtgcttgacctcatatgctcattgtcaagtgaagagaactttgtcacgatattagatgacactagaagaaaaatgggtaactcaaagataaaggttcgcagattgtccattcaaaatagcaagatagatgtgggtaccactaggatggagcatgtgagatctgttactgttttctcagataatgttgttgggaaagtgttggatatttcaagatttgaagttctgcgcgtgttggatttagaaggttctcatgtctcagatgttgggtatgtggggaaactattacatttgaggtacttggggctaaaaggtactcatgttaaggaccttcccatggaaatagggaagttgcagtttttgcttaccctggacttaagaggtactgagataagagtactgccatcgagtgttgttcagctaagacgtctaatgtgcctgtatgttgattatggtatggtgctgtctggaataggtaacctgacttccctagaagtgctagatgacctggggttatctgaagtggaccttgattttgtgaaagaattgggccatctgaccaagctcagggtgctccggcttgacttggatggtttggatgagagcctgggtaaagctttggaggaatccattggtaatatggacaaactggacagcctagatgtatatgtccgtcgtggagtcatcaattgcctgagcgaagattgggtggctcctccacaactccgcagattggctttcccgtcaagtgatagttggttcaagacattgccgtcatggattaatccttcatcgcttcctctcctctcctatctggacataacggtgtttgaagtgcgatcggaggccatccagcttcttgggactctgcctgctcttgtttatcttaagataatgaatcattctgtgtactgggaaggacatgaggtggaagcgcccgttctttcctctggtgcgttattcccatgtgcgacagagtgccgcttctttggtataggtgctgtgccgtctatgtttccacaaggagctgcgccaaggcttaaagtcctttggttcgccttcccagccaagtgggtctcccgtgaaagctttgatctgggcatgcggcacctcccttccctggagcgagtcgaggttgatgttatggagggagctagcagtcaggaggaggtggatgaagcgaaggctgcggtgagggccgcagcagatggccaccccaaccgtcccgtccttcgcttcagtacgcagtaa

SEQ ID NO: 3 - DNA, 201 bp, synthetic construct
  source 1..201: mol_type = other DNA; note = marker ge51829s01
aatggatgcatatcccagggaccttccaccgcacggggccaccccgrcgttgcgcgtcgtccatccccatgtacactcgccactccttcatyaggttcccraggtcatgsagcttggctgcgaggccgacgcaacaattggcgtgcatggtgtagagcgtgttgaagtcccgggtgttgttgcagaacccggcattgtgca

SEQ ID NO: 4 - DNA, 201 bp, synthetic construct
  source 1..201: mol_type = other DNA; note = marker ge51835s01
gtgctctcttttaatccggagtctcgaaaagtttcaaacaccatctgtgcttagcttatataccccttgttgtctttttttctygtcatggtgaagatcastagccactgttatcagcagaagtggtggtgtactggttttggggatatattccgctgtgtagaatttttgggcaagctgcatgccatttgtacgaattta

SEQ ID NO: 5 - DNA, 201 bp, synthetic construct
  source 1..201: mol_type = other DNA; note = marker ge45688s01
caggtgttcatgctccctgacatcagatcggatagttggtccattgaacagtgcttccatcgcttcagctgccatttgagtatttggcccaatatgatatkctgcatatgaatcatcggtagcaccaactggttctggtttcttaatacagttcatgcccaggtcctcatcaatacagtctagcatagcaccaactgatgt

SEQ ID NO: 6 - DNA, 202 bp, synthetic construct
  source 1..202: mol_type = other DNA; note = marker ge45691s01
catcgtcggtgtgctggcaagagaaggccgcctcatcatggacgaacatcttgaggccctcgatgaggaacgtagagaactccttggtgccctcgatctgrgtcggtgtagccgtacctcgccacgcaccggaacatgcggtgctcggcggggccgaccctgcggaagatgaagcgctccggcagcgccacccgcgggatgg

SEQ ID NO: 7 - DNA, 115 bp, synthetic construct
  source 1..115: mol_type = other DNA; note = ge45717s01
ttgtcgagctgsagcttcaggagaacatgctkacyggmrtggtgccgctggaggtyctctctcttgttcttgtsggggacttgactgaactgtgagtagtgcartttgantcaca

SEQ ID NO: 8 - DNA, 114 bp, synthetic construct
  source 1..114: mol_type = other DNA; note = marker ge45718s01
ttctcytcyttytggatttaattaggrtayatgcttccattcctgtcaattgagackgcctgataacactgcatttcccttggtgttttgatttgtccttcttctgcaacakac

SEQ ID NO: 9 - DNA, 101 bp, synthetic construct
  source 1..101: mol_type = other DNA; note = marker ge45719s01
atctcagccgggcccttcctgttctcgttgaacatggcgaacacgtaggcytcgatggcgccgggcctcttgggcgtcccctgcccgrcatggatatgttt

SEQ ID NO: 10 - DNA, 20 bp, synthetic construct
  source 1..20: mol_type = other DNA; note = CAPS forward primer ge45717s01
tacgacaaccatttcaccgg

SEQ ID NO: 11 - DNA, 20 bp, synthetic construct
  source 1..20: mol_type = other DNA; note = CAPS reverse primer ge45717s02
cgtgtcctggatgaccgtag

SEQ ID NO: 12 - DNA, 20 bp, synthetic construct
  source 1..20: mol_type = other DNA; note = CAPS forward primer ge45718s03
agcaagtttgagctcggtga

SEQ ID NO: 13 - DNA, 20 bp, synthetic construct
  source 1..20: mol_type = other DNA; note = CAPS reverse primer ge45718s04
agcaaagtagagcaggcacc
